United States Patent Application Publication US 2026/0191916 A1 - sequence listing, part 59

SEQ ID NO: 279 - DNA, 1061561 bp, UBA1417 FBI02365
  source 1..1061561: mol_type = genomic DNA
ttagttccttatcactgttaagccaagcaattcttctttttccattagcgatgtacctgcttattccggttcgccatatgctgtaatcaataacaacattccgtattttaccgagagcgactatacaaccagctcatatgagtattacagtgatcttgactcgttggggcgatgcggcgtttgtgttgcttccatcggaaaagatttaatgccgaccgaagaacgaggctctatcggaagtgttaaaccaacaggttggcatactgtaaaatacgataatgtagatggaaaatacctctataatcgttgccacttgatcggctatcagctttccggtgaaaatgccaacacgaaaaatctcataaccggaactcgctatctaaacattcagggaatgctgccattcgagaatatggttgcagactatgtgaaagaaaccggaaatcatatcctttatcgttcgacgccaatttttgagggcaacaatctccttgcaagcggtgttttgctggaagcatactctgttgaggacaatggagatggcatttgctttaatgtatattgctacaatgtccagccagacatttcgataaactacgcaactggggatagttcattcgctggtactcaacaaacagaaccgccgaagcaaaccgaacaatctaatcctccagcccaaaatgttgaaagtacctacattctgaatgtcaatacgaaaaagtttcactatccttcttgctcgtcagtcaaacaaatgagtgataagaacaagcagacttataccggaagcagagatgatctgatttcccaaggatatgacccctgcaagaaatgcaacccgtaaacaaaaaaagcgccaccgacccacatcaaaagtgagtcggtggcttttttgttagtagttcggtactccgtatccgaggatttcgtagtgacctacgctgtactggtttacccgacagctatcgccggagtttccctcaacggtataaacgataccgttttcgactttttggacaataccggtgtggtcggattgtccatcctgcggacccgacgaacccttgttatcccaatcaaagaaaataatcattccgggaacaggctcggcagagccgtctatccactgtccacgatctttgaaccactggacgccgttcacgcagcccgcatatttcggcacaaccccggtgtcaatatagccgcactgatcggcgcaccagcttacaaaacaagcacaccattccacacggcttccgaagccataccaagaccaatacggctcgccgcccacattgcccacctgagaaagcgcaacggcaacgatttggtcatccactccgtagattccgtaaagcaccgccgcccacatgccgctgtcctgcgcaagcagttctgcaagctgctgcttctgatcctcattaaagccgtactgtgtagccatctcatccaccgtcttgtggctgacggtaatatagagcgtcgtaatcgtctcctgcgtttcttcctcaaggatattgccgttgccgtcatccgtctccacaatgaccgtctcggtcgttgtttccgtccggtaggtaatttcgttcatctcccagaacaggtctttcagaagctgttccttttccggagtaatcgttgctacctcctggggattatccggatcggaggtcgttttgacagcatatattgacagcacctccggccacacggcccgagaaccggacatttcaagcgcatcgtattcaacggaatccttaatggcatccagctcgttctggtaatccatgttgatttcctgaatgacctgccgcatcgtctttcctgagccggtatcctcgcttgaaaagaaaataccaaagcaggagcaggcgatcaaggcaacaagacagataaccacgacgaccacgaccgcaacccagccaccggcagcgatagccgcaaccagtgctttcatcgccgctgctatggccttgattgccgccgcaacagctttcgccgccgcaacagccgctttgtaggcggctatggcagtctggcgggcaatctccgccgctttctgtgcagcctttgcagccgctgccgctgccttttgcgttgccttcgctgttgcctctgcggttttgatggcagccttggaggttttctccgcagtctttacggccctctctgttgactttaccgttccctttgcaccggcttttacggtctgtctaccggcagagcgagcagactgcttgatggtgcgttcggtacgctccgcagatttgatggtctggtttcgtctgctccggatgcttgtccgtgtggcctccgtattttgccgcgccgcctgccgtgcagcctcctctcgcggcgttctgcttggcgcgcccctacgcagctcctcctcatagcggcgaacccgttcttcatttttgtggatgcgcttttcattgcggtgctcccggtgcgcctccttgcctttttcaatggcttttttcgtttggccggaaacctcgtgccaaacctgatcggtcacatcctcagcagcatagcggattttgtcctccgcgtactcggagggggaaatctgcccatcgtccatcaggttttccgcctgatccttggagcggacgagcgccgtcttcatgcgctcggagacaaccgccgctttatcaagaatcttgatatccttaacgctctctcttgtttttatcctgcccaaagccattacctcctctcagagcagacaagtcacaccttcttcgctacgacaacgaagcgaccgttgggataggtatattcgcaggtggaaagggtcaaaagctggtctccgtattcagcagtaacccccgtatcatagagctgtcttgcatggatattctccatgaactcggcaaactgtacttcatccatcagcgtgtattcgttgtacttgaaggtctcgcggttcgtattgaatttgaaagcagcaacgacctcatatttgccgaggccggagagcgtatcaaaggcaatcatcggatgctccttgcagaagtcggaatcggtgtatttgcagaggtcggcaaacatagagccgttgttcatgtggtgcccataaatcacaagattgttgctgatcccggtcatacaggcctcgtcaatatagggaacaccgtagtcgctgtatgatttatcaaaactgtgcttcagatagaagtccggcttgttcggggtctgcatgacggggtaattgacattcgtaccatcgatcttgatccatccgataaagtcgttgttctgcgcaaacagcgccgcatacttttcacgggccagcgccgcctctgctgccgccagttcttcttcgctcaggccagatttctccgcttcggtggccttctgcggcttgtcgatttccgtaatcagatttgtcagatcgtcaaatgtcaccttgctgttcttggcatccagatactgatgcgtaaacatggcgctgcaaaagatcgctgccgcgccgagtacggaaacgatgatgattccaagggttttctttttcattttgtattcctcccaaaagaatggaggacggggttaatcccgtcctcttgcaaatttgccctcaccggggcgcgtggtcataagctgatagagcttggtgtcctgcgggaaccgattgatgaagggcaccagcgcagagccgtatttaatcagtccgcagccggcgtcggcattggtgatatagctcatctgctcattggagatgttcaggagcttggcaagctggcctctgtcggaggcagcctgattcagcataaccacaaattccgagttggaaagcatggtgctggcctgaacagaatccagcagatactccacattctgcgtaattgccgtgggatatgcgttgcgcttacggaactgccgccacgcggagttaaagaactgcgccgagaactcgttctcgaacaccacatggaactcgtcaataaagacatgggtgcgcttgcccttcttccagttcagcgtcacgcggttgagcatggtatcggtgatcaccagcaggccggtgggcttgagctgggaaccgagaccgtgaatgtcgaacaccacgacacgcttgtcgaggtccacattggactgcttgccgaagatgtccagagaaccggtggtatagagctcaagggacagcgcgatctgcttcgcttcgggctcaggctgctccagcagcatatcgcggagggtgcagagagtaggaatcgtcccggtgtccgccgcattgcggtacacattggtgatacagcggtcgatgatagacttgtgctgtgggccgacgcccttcttgtcgatctgctcgatcagagacatgatgaactccgactttacgacaatggggttgttttcaccgtacccgtccaccatatacatggcattcagtctgtctctgccgccggcagacacacggatcaccgagccgagatcgcccatagcttcaataagcggcgcgtattctccctcggggtcacagatcataatatcatcgttggtgttcagaatgaggaaggtaatcagctcctttgccgagaacgacttaccggaaccgggaacaccgagcagaaaagcggactggttcagaagatttgccttattgcacatgatgagattgtgggaaatggcattttcgccgaagtaaatgccgcccttatccatgatctcctgcaccttgaaaggcatcagaaccgcgaggctctctgtggtgagagtgcggaaggcattgatttttcgcgtcccgatggggagcaccgtattcagtccatccgtctgctgatatttcagcgtcgccatctggcacatgtgctttctcgccgtagacagcaccgtttccgtatcctgatccagctgctccttggtgtctgcggtgatcaccattgtgaccaccgcaaacatcatgcgctggtcacgggtggtcaggtcgtccaaaaactccttggattccttgcgctgaagctccatgtcgtagggaaccacagcggagaagttgttattctgattctgccttctctgccagccggtgatgttcgtttccacgcccagcaagaggcgctccacctcacggacggcttcatcggtagggatggggatcacatcaatggagagcatgagattgcggtttagctcggtcagctccgagaacatgctgtccttgatatagctggcgtagtccttgaggaaaagcactctggcatatttctcgcccagcttgatatgatccgcagcacgctctatgctgtccgggcagatgtagtcacggaaatcatgccccagacgcgccttccggttcatatcaaacgagaatgccgcctcatcaccggggcgataaaagtcgtggagaatgcgcagccgctcaacggcgttcaggggcacacacttagagcccagatttgcgaaatgggcggtcaaatccgctccgattctcgcaaaatatgcccgtgcttcctcgatgtctttcttcgccacagtgatggtaatatacttttcctgtgtgatgccgtttgcccctgttgccttgtccaggagcatatcgttatactccttacggtactcatccagcccgtcctgcttcatgggcatcaggatggattcctcaaaatcagacctgttcagcctgtgattgttgatggtgatcttcgtgacagctccgctgtccaagctgttcagaagttccgagtatgtcagaaacatgctctctttatcctcacggcttgccaccagatagttgatgtccgagaatcggaaggacttagagaacttattcccaaccttgaaaatgccatccggccagatgttcttgatcggaataaggtcctgcacttttctcggaaccttaaacttttccttgtcctgtgcaaggatcgctttgatactcttaatcattgcgcttgtaggcctccttttcgtgttcatcgattgcgtccttcaacgcctcgtagtagatattcaccggctcgaatttgatctgcttgggctccagcatttcgctgcggagccaagcccacacaaattgctctgcggtcatgccgttgtagttcacaaagcccattgccgcaaagggagcagcaccgaggatgcacatccacgaaaccgtttctgttcccacatggggcttcaagacgaaatacaaaagcaccgcaacgccaacagccagtaaagaaaaaacaaactgtctgagcgacagtccgaaaaacatggactcggtatagttccgaatctctctattgattttgacctccattttcattcctttcccggcgcagagcctcttgaagctcccccttgcagacgcattcctctgcaaggcaatttacttcgcctttctttctgccgccgtaatagagacaatatttgcaatcgcaatcagccacggtatatccgcgccattgattcagtacacgctttgacatacttagatacccatcatctccttcacaagccggtctgccattttcaccgcgccgaccagaatgagcatgttgaaaatcagctcgccgatgtagctccacaccatagaagccggagctgcattcggatcaacaacaggcgggctggacgcaaacacggagaagatgatgcaggccagaacaatgatcgctccctccaggcataccgacgcatagcttttcaggaagctcttgccgatgttctgcgtaggttctccggcaaaggccgaaagaggaaccggcgcaagtgcggtgtacagtagggtaagcgcccggcgccttgccgcattgctgcggtaggtttccaaacgctcccctccaaaccggacgtacacctctcgatgtatccggctttccagatatcagtctaactttccattgtgcagctttacatggcaggagtggcacagcgccattgtcttgcgtttacgcgcaatcatttggcgttcccattctgccttaccacttaaatctttcagttttcggacatgatggatttcaatattctctgtttcggctccgcagaactcgcagatatggccttgcaaccggtctgtcagccgggtatagcggcggttctcgttagccctgccaataatgtccgggttttccgttacaacgactttgtcgttatggcgcataccctgattgtaaaacaccacggattttgtcccgtttttcgttgaatacgatacggtaaaatccccgttgcggcagtatttgcgaataattttccgcatgctcgtccgatattttccggcgaaggtcttgtacatgctgaacttcatcacatagaggaaggcgttcaacaccgttgcattgtttgccagccgaaaatagttgtacatgccccgcacttctgcattgtactggttcagaatctcaatatcatccaggcgtatcaaccccggacgccgtaccggttcccatacctctttgttcccatgggttttgtcatagctgattttcagcgcgccataggagagaaggcggttcagccatttctctttgggcacatacagcttgacttttcctacataggttcggcgtgtaaaacccgtttttgtccgggtactgttttgttcccggctgactgtaatcagatatccgaggaagtgggcaaagtcacttccgtgggtaatgagcgttttttccggggacatctccaagtgaagatgttccttgatgaacgctcccacatcggatttgacctgcctcgcatcctctttactcccaattacaccaatcaggaaatcatcagcgtaacggacataaacaacccgtctgtattccgtatccatggggtcgctgtaagggatagagcgcagttggctattaagttcctgtatctgcgccatgacctcccggcgtttttcctcactgatttttgcttcattgcgtttcagccattcctgttttccgcgccggacatccaacggctttttgtaggccgggttgattttccgttttgtaccgcggttaaaggatttggaatactccgccatgaacacatccagttcattgaggtagatattcgccagaattgggctaatcagcgacccttgcggggtgccggaataggtgttgtagtacacccaattttccatatatcctgctttcaggaatttccaaatcaggccgataaaatgctcatccgcaatgcgcctgcgcagtatctgtaccagcacatgatggtcaacgttgtcaaaacatcctttgatatcaccctcaacaaaccatttgacccccgtgtaattccgcttgatatgttgcagggctgtatgacagctccgctttgggcggaatccatgggaagtaacgtgaaaggtgggttcataaatgctttccagtatcatgcgcaccacctcttgcaccagcttgtcgtcaaaagacgggataccaagagggcgtgttttgccgtttgcttttgggatatacgttcttctggcaggttttggctgataactgaactccttcagtttttgaatgagggcttcaattcgcttcatactcatgccatcgattgttttcccatcgcttccggctgtcatgttgccgggttttgcttggatacgctcatacgccagcagaaaaaatgcaggattgtacaagtttcgatagagcctttgatagtggtaatctttgtttgctgcttttgatgtcagactttccaaaacgttctttggacttctcatagtgcctcacgcacctttccattgatagtttggttgatatcctgccgcccttcgccatgtgcaaggctttcccttgctcagactactacggcggctccgttgccataccgaattttcaggctctgaaagccatagcctataagggcgttccgggttaggcaatccccggttaggcagtttgggacagcgtgttgtgatgtcggaatgggttttcgtccgttatccgcttactgcggttggctgccgtgggtatttcgcaatcggcgtgtacctgtcaccggttgccacggcatgcggcgaatacaactatcctgcgccgccggctcaagtatgccgccttggactgcccttcaagcaatccagctttattcctcattcacaacgtttcaccttgccgttcagtagtggttcgatagtttcccaacttacgacgttgccgatatgctacactccccattgggtttccccgccggataaatcggttggtgatagggtaatttgcacctcccttcggaataccttctcctactgccgcgctactggcagaatcccaaattgcccgcgagctgctttggcttatgccgcagcccttccgggcgcactatacattttgaaaaagcgaccatatacactcagaatcatcacgaaggacagcacccaaatgaacaggccaccgataagcgttaccgcccacaagggtatagactcaaagaatccgcagtcctccaccgctgtgatgatctcctgcggcagcaccgttgcctgtgggcttccaaagccggcagaattcataatcgtactgaccacgccctggataatctccaaaatcgccatcatcagctccatgccgtaggtaatcaggcctttagcaatcgcaaaacggacgaacaacttcaccgcgtgctccggctttttcagctcggcaaaggagccgcaggttttcacaactcccactacgaaaaacagcaccaacagcgcatagccgatggcctgcagcgctccatggatactgcaaataaccgaccagatcgagccacctttgaatgtctgcggtgactgcgtgatcagctgccaaatctcagacagcttatcgttccagacttccagtgcattttccaggttctgcacaatccagttatccgacattcgttacacctcccttcggggcggtctttgcgaccgcccctttttcggaaaccggatcaaccgacgatgaggttgaggatttcctttgcaaaggtgatgatgacgccgccggccagagtcaggaaaccgttggaacgctggctgggatcgtgggactggaagctgaggccgacctgcacaatgccccagccaagcagaatcaggccgaccgcacggatgaggccgaagataaagtcgctgaggttgttgacgacggtaatggggtctcctgcggcaaaggcggtcacgcccatgctcatggtaagtgtaagggcaaggacggccatcacataaatgcggtagcccttcttgaccttgccgggaatctccggcttgttgatgttcttcttcgtattaagtttcttcatcgccttttttctccttttcatcaagtagttcttccagctcctcttccgagtagagcaagaattcatgtttttctgcctccatcttttcggcgtttttgacagccttcttgtcgaagctgaacgccatggaagcgatacttcgggtatcctcaccgtgggtataggccggtgcggaaccgtccgtcgtaagtgccacattgggatgatgaaggatgtcatacttgagatcccggatggggcgctctccgcgtataaaaagaagtgcgtaccggttgtccagcatacgcacttcgtcaggtgtcatcagctctcgtccggcaagctgatagttggtggaatagcttccgtttctgccgcgagaccgtccgtaggtattgtggagtagggaggcaccgccttgccatattactatggtaggttcgcaccaccctctccgggaaccggacttacatctctcaatgtatccggctctgttatcgttcggtcagcagttactcactggttgtggattgcaacatggcattttttgcacacaaccagcgttttacgccgttttgcaatcattgcaacctcccatgcctgcttgcccttaaggtttttgagcttgttgacatggtgaacttcgtaacaatcgctctcggtcgtaccgcatagctcacagacctttgctttcaatctctgctccaaggctgttcgggaatatccgtactccaccgcagcattgcatacgatgtccgtcggattggccttatccttgcaatcggagtattttgcaaaatagcatcgtttttgccccgttttggtttcgtaggggattccccattctccgtagtggtctttgaatttctcaaccaccttggctatggtgcatttatgcttacttgcgagggttttgaggcaactgtattccatgagataggaaaagtagcacagtttataaaaattgctggcaattccatagtagttgcagattccccgcagttccgcattgtaggcagaaacgatttccaaatctgtgagtcgcaaaagagatttacggcggacaggcatgagtttcccatccggtttctgtatcgcaatttccttggcgaaaatgaagctgtgaatcttatcatcgaatgggatagacagttcacaggaattgttgagggtgcgttttgtctttttgcctggcccaccatgcttgataatgctgcttctgcgaacacgaacatcataccccaaaaatcttgcccttttgctgctatgagtgatgagtgttttttcttcgctgagttccatctttaaggtttcacggataaactcagaaagtttactctttatccactggcagtcctcttgacttcctttcacaccgagaataaagtcatccgcatagcggatatacttgatgcacttttttgtctgagctgtacagggcattttcagcatgagcttccgcttttcgttgtattcggaaagcagttgttctctttctgccccggtgcgtctgccgatgtgataggaaagtttctggaggtcattgcttaggaggcgatattctgtcctgacaggttcttgcccatgggtatcaaattcgcttttcagcttcattacaaatttgtccagctcatgcagatagatgttagcaaggagcggagaaatgataccgccctgtggagtaccactgtaagttttgtgatatttccaatcctccaaatatccagcctttagaaatttgtaaatcagctttatcaaccgggcatccttgattttactatgaatcaagcctacaagaacgctgtggtcgatattgtcaaagcaccctttgatgtcaccctccacgaaccaacgcataccattgaactccatttttaaggatttcagtgcggtatggcagctccttttgggtctgaatccatgagaaactggcaagaaaacaggctcatacaccgcttcgagaaccatccgcagaacttcctgtaccagcttatctgtgaatgtcgggattcccagaggtcgctttttcttgggattgttcttcttctggatataggttcttctggcgggtgtgggctggtaggtttcatcagcgagcctttggatgatatttgcgattttggcttcgctgaatccatctgccgtgtcatcgtttgcacccttagttgcggcaccactgttggcatacagatttttatatgccagaaaatacaggtctggcctcagcatatagcgatgcagtctggtaaaaatttcatctttatttgcgagtgagtttctactgattcttgctaaaatttcggttgttggttgcattttgaggttttcctccctaatcaacttttcttttagtacacaataactacgccccttcgccatgtgagggtcattacccctctcggactactacgggcgttccgtgcccatgcaggattttcaggctctacagccatagccgaattttcacctccttcggttggcgttcctgtttagggcatccccagttagcgttgagcataggcaaatgtggattgtcggtctccgctttcgtttccttgccataggttctcctacagattgcacaccgtttttgataaccgattgattgacacctataaccaatcgccagtgtgccagaggttacagatactttcctccgcctgaccgataacagaaattagaaacttgcgttcagtaaacccaacttaagcctcatatccacttaacattgcagttcagtcgcaccaagttatctttaggtgacttactgctttcctgccgtgctgtgttcccgtttcagctttcgcctttcggttaggcaggttgtttcccgtgttatcttacggggtagtgccttacactactttgctcaacgccctatctgggcgcaccgtatcgatggtctccttgcccagcagcttggaaacatactcgtgggtactctgctcgttgccgcccaggtacagaaattcatcgcagttgcccacaatactttcccattgcttctcgaacagcgctttcagctgcgcaaggttctggatgatgatggagacggaaatctcacggcttcgcatggtggatagaagcttatcaaactcatcaggcagagcgacattggcgaactcgtccatgacgaagtgcacatgcacgggcagcctgccaccgtgaacagagtcggcctgatagtagagctgctgaaacagctgggtataaagcatacccacgatgaaattgaaggaactgtcgttatcgggaattacggcgaataccgccgttttcttttcgccgatttgccccaaatccatttcatcgcattgggtaatgccggccagcgaatccagattgaacttttccaaacgggagacaagggaaatctggatggatttcagcgtcttagcgctgccggagtgatatgcccggtaatacttgagggcgatatgctccgggtttctttcctccaatctctcaaacagctcatcgagaacagattgatactcctcgttgtcctccttcacatcgccggctcggatcatctccatgaccattgaaaagttctgctcatcgggcggagcctcataatggagatagcagacaagggccttgagcagcatggctgccgtctgatcccagaacgggtcctgtgtctgcgaacctttgggcgttgtgttcttaaagaggtttgtggtaagccgctgaatatcatcatcgctgctgatatacacgaacgggttgtagcaatggcttttctccatatcaataaggtcaaggacttttatttcatagcccttctcctccagcagatggccggtatcccggagcagttcaccctttgggtcaagcacgacgaaagaagtattcgcattcataatgttgggcttggcgtagaagcgtgttttacctgccccggaaccgccgcataccaacacattcaggtttctgcggtgctttcttccgtccaggccgatggcgacattttgcgtcagcagcttgttttccgtcttatccttgttggcatatttcttgttgaccgaaccagccgtgccccatttggccgatccatgctcttctcgccgcctgtaattgtgctccgtggaaagatagacgccgatggcaattccgtacaccaaaagcaaaacgaggacagtttttacgctgtcctcacaaagctgtatttggaacgggttttccatcaccgtcccgaactgctgaaccagtccgggcaatccatcctttaagcagggagcaatcaacaggccgagccacacaaccggaattatgccgcaaagataaaggatcacattctgcttggagagcttatcttgcctcacggtcggctctccgtttctctttctttgttggggcatcaatgaccttcaggatcaaatcgttaatgtcttctgtgggcttttcgtcccggagaagatcgttccgaaaatccatcagtccgctgaccatcagacgctgctcaaaatcgtccagcgtgacgactttcttttcctcagccatattggggtacctccttatcttgcttcatccctgcgttccttgggcttcatgctcttgtccagcaccttcgccatgtcggacgagatctcattggccacatctctgatcttggacagctcgtttctcacactgcgggcatccatcgtagagaatccttcgggaagtctgtcaaagcggaacatatcctttggcacattgtaccggctgcagagcacatatgacacgcagtaggcggtaaaggcatgatcactgcgcttatatgcgccgtcgtccagatgcgcgtgagcaagctcctgagaaatgccgcggaaaatgtcaccggcctccagcccaggtctaacatagattttcttgtcgtcgggacgatataccgcgttgatgttctccggcagcttttggctgatctcgatggggcaaggtgcattgtggatgatggctttcagaagcagccgctcgtcccgcttcattgcggggcggtccttggcctttgcggtcgtctgggaaatgtcgaacaccttcttggagttgtagctgacacccacggtgccgtcctccttggtgtattcctcgccgggctccagcaatacgattccgctttcgccctttttgatgaacacgccgttattcttccagcccttaaaatccgaaagctgggtggcgtcggctttctgggcggtgatcagaaccgcattgcccacagagtagcggtcaaaacgcgcctgcacatccagataggattggaagaggctgccgtcatttgccatgtgctgtgcagtctcatcaatcatggcaaaagcgctctcgcgctcctgcttcttctgtgcagcccactcctccttattgaaggaaacgaagctcttatcctccatatccttctgcgcgtaggcattgaaaatatcatcatagtttgccatggtcatctctccttgtcttttttctttttcggcacgggcctgtgctcagaggttctgttgggttcgtccttggttttctgcgcggagctcgtcctctgtctctgctcctcccggatctccttcatttcctgccggacagatgggcgggagcgttccgtaggattagagatacccctgacggttttctcgcgctgatttgatgtaggctcggacggacgggatttcgcagccgggccttgcgtggggttttgcgtttgcgcctcctccttattgggtgcaggggtaagaagcgcatccaggaaggcttcctccttgtccttttccgtggtgttgcggtcggggactggaatgtccgcgttcttctgttcctcctttgccttgacgatttcggtacgcgccgagccgatgtctgcggtggcaatgccgaagcggtcaaaaatgcggttgatcttgcttgcgtcctctgcgcggacaaacacatcggtgtggccgtcgttcgccgttttgtccttcaaaacgcaatacagaatgccgtatttcttcgcttcacggcagaacttttccaggtctctgtcaccaatggcaaaaaccttgagttcctttccgctgcggagcatactgttgagccgtgttttcccgcgcgtctttttctggtccttcagcaccgcataaagcagcaccgccaaacgctcagcggccttcccgctgatttttgcagccacctcaacgccgttgagcgtcatcctcacgacctgctcggctgcttctcctgacgagtaactcattttccgttttctcctttcgctcgattttctgctgctcgatttgctcaagattcttacaaacctgttccgaccggtcagcgatgtcggagcacagcacaatatccctccggcaggttttcagctctgtggtcagctccgcgatccgggccctggttgcttcggcactttgaaaatcttcttttcttaggtgccgcttcagttcatttttcagtcccgtgcgctgctgtgtcaaagcttccgcctgctgttccttttcggccttatagccggcaagggcctccacagtttcgattcctgttttggcaaggaaatccgcctgagcaatgtatctgtcgagctttgtcacatcctcacgcaaaaaagccgacaccttttttacagatgccggcttatgcacgatgatgtgaagctcataacagtaatataggtacagggcgtaaaggccggttgccttcttcgctttctccttgtattggtaatagggcgctttcgtgtcctccgccacctcggggaagggcgtcttgcggcggtagttgttctgaatccgctgcttgatggaatccagctcgtagtattctcccagcttgtccaagcggaagttcttcccgccgtccacgattctcacaatggggtggaccctcggcgagcccttcggcgtttttgtaatcacctcgtagcccatttccttcatgacgcgcaggaactcacgctccgtagttgaggcgaggatcgccctgtcaatatcctcgcgtattctgctgcgcatggtcggcttgccgttcttctcggcaagccattctccgtaattggctctgcggtcggcaggggactctatcacggaaatcttggcttcccggcacagccggtcggagacctcccgcatccgtctgtaatccgccggtgagttatagaacttcttaccgtccacatcggaaacggagtttatgacaaagtgattgtgataatgcccggtgttgcagtgggtagcgatcacgacctgaaagcggtcgccccataactctctggcaagggcgacaccaatgctgtgtgccgtatctgcatccacttcatctgccttaaatgattgataaccgtgatagcaggacctgccgccctcattatgcatcagtcgctttgtctccatgaactcctgcgccgccgtttcctcgctgtggagattgaggcaggtgacataggctcttttctcggttttcatctcgtcggcagcatattccaccacaccttcgatttcatgaagctccgagagtctttccttgtcatgcgttttctccggattgcgggcgtaattgatgaccttgtccacccgtccttttatgggccagatcgatgtaaccgccattactgataatcggaggtgtacgcatcagataccattttcgtggcggctctgattccctccaagtcctttctgaattggggcatatccggcacattggtggtgttgaatctcttcaaggtctgatccagattgtaccccacctgccgcatggcccgaagcagcatgggaatatccgcaggcggcgcttccttaatttccttatctgctacgctgcggcgaacaaagccgccgatggatagccctgctttctttgcttttttggaaagcacggtcagctcgtccttggtgaagcaaacctccactctgcaatttctttttctcaaaaatactcatcctttccgttggggtttcaggggcattgccccagacaagcggaatctgtacggacagattcgttgcttgttaagacaatgccacgagaaccccatatttcattcttgttctgtgtagttcaaataggctttttctgttgaaacggcagtcctaaatctcactcttgttcctacgggtcatctgacagaccgaagaaagtatccctgttcatgtggctccaaattgatgccacggtgtataaagatagctgaaattggctccaaattgatgccattagaagctttcgaggaaatccatgatgctactttcgttctcatcagatgcagaatccgtatccggctcaaaaggaatgtggagtgaaatattacgaagttcttctgaaataacctttctcaaaagagcctcaagggtcgaaagcttgtgtgcggtattgattgaatcaatcacttctttgttgattggcccacagctgctgctatgcagcagttcccatgcgtttctttcatcctcgatgtccaaattaaaccggatgctgattcgcttatagctcattgtggtgttcctctcctaaagctcagctgtgcgagatattcataccccttcgccgtagcgcagatatcgtcattgatggtcacacgggacgcatcgtacacgccgaagttgcggatcaggcagctgccgccgccgagaacatacagcctcatcagctccgggttgtactcgtgctcacgaagtctctgaaaaatgccctccacataatcggtggccgtgtcggtaatggttttcagatactcctccttgatatctgccgtaccgaaacggaacaccctgttgataatcgcctcgtccacggtggtgtgatgcgcacgcatgacattctcccgcacggccagcaagcactggtgtgtaccgtatttctccgtaaacatattcccggaaaccggctttttgtcattgatgaacatgatattcatggtgccgttcccaatatcgcagatcatgtttacgccccgaaagtcagaaagccggtctgccactgccgcaaagccctggggaaatacatccacgcccacgatctccacatggtaggaaacatttcggaacgagaagtctacagctttgttctgcaagagatagtccctgaactcgtcccgctgaccactgacccaggtaagaggaagacctgccgcaattctgattttgccgcaggtcatttttcggatattcagttcccgcgcgatggccgcaagcgccagcacatagtagtccaaatctttcgtcttatccgcaaggaactccttgtgcccttcaccgatcaggtagaacttgctttcaaagacaagcagattttctttgaacaccggctccttggcataggtggaaacgcttgccgggaagcagcagtttgcggttttgatattgccgtagccgctgtcgattccgattatgattacatcgtcaatcatcttcatgtcgtcacctccatcagcgctcgcggtctttttcgggcttatagggaacggccttgatttccccgccgacacgaaagaagcgctccggattctgaaactgcttcttataccgttccaactgttccttgttgagggagccgaagtacggcgtgctgcaatcgcagatgaaaaaggggccgaagataatgtccgtcatctccctgtcttctccgtagatggctcgacagggccgcatgccgttgtacttaccctcatcgttgcagacgatgcagacctgctcttcaaagggataatagggctcgatcagcccgccgaccaccctctgcaaatcggaaagctccgtcccgatctctgcaactctggcgaccttgcccggttcacagagcaccactttgattttcttctctttcaggggctcggtcatatccgggtcaaaatccacttcccgaaagccgatactgtcgcaaaaatggaaggtggacttttcctcacctacgacctcaaccacatccgaaacggaaagagacctgcctcggtatccgtccggttggccgatgttgaacatctggtacacttcttccagggtgccgcattccacctcgccctcaaacaccttgtcgtagatctcgctacgaagcgcggcagagtcctgaaagcgctccagattttcgtagttcaagaaggccacattgttctcgtcccggtccgggtcgatctgataaattgcaatgttcatgtgcgttcccgctcctttctttctctcataagtcctacacggattttcagctcgtcatttacatctttcccatgggcgggcggctcgtcatagacctgataccttccttgcagcccgccaacaattcctttcacagcacctcgtccgacggcatcgttatccaaatgcagatggattttgcggacggatgggtgctcgtcaagaaatctgctcaaggcaaccggcacaacattctctcgtttagtctgaaacacaccggctaaagacaaataggtttcacttttccagtcgcgcccggcaagcagctttaaggtcgcgtagctcagcagatcaatggcggattcaaacacatggatgcgctccggattctgttttccctctaaggaaaaagagaaatgcttatcgctgccggtcagttcgcctttgtagctgctgacagtgctgcgcagagcgccatatctcgctttgccgtccttgtcgtaccctacgaacatcgcattgtggtaatctgcagactcaaagagcagcctgttatccaggcaataacgggtaataaccgggtgaattcctcggccttgcaggtatttctccacgcggtccgttgtttcggacagctccggcatcagcagctccgtgcttcttcgctccttctggcgatagaaaacgggaggcttttctgcctcccgtccgagaatgatttctgctgcctgtgtaaaaggaatgccctttaccttgatgagatagtccagcgccgatctgccgccgattccctgagagaaccagcaccacttgccgttgctgattcgcagggagtcgtgctctctggtgcaataggtgtttccggatacatggacgagctcttgaggttcataattgcggaggtaagtcaaaaggtccatttcctttgccctggcaatatcctccgcagcaatatagcgcatagggcatcacctcgcttcacgccggtctctcagaaaatcggcccggatgaccgcattggcacggcactcgatggtatcgcggatgttgtccatgtggtcggtctcccgcttttcaaagtccttgaacacatccgcaagcggacagggcgacttcaggagcgccttgcactgcttatcggataggtcgtattcctccagtgccagcacaatgtcctcccgtaccgtgtactcgtagcagtggttcaggatttcattgggcggctgggaaagcagccactcccgatacttctcctgttctgcgaacaccttcttatataaagcggtgttcagttcttcgtttgtcattttgcttcctccttatgttttttgaacaacacgcttgaatttcagtggactatgttcgatatattccgtaatcaggcgtgattgttcttttgtttccgggtatgcagttatggagatagttttcttgctccaatccagggtataggtgtcggcagccacattcgtaatgtgatgcgcagccagaaagtcccggaaattctgcatagcttcgagattatccgacatgatcacatttacataggttctgtcctttgacaacttctcgctgaacaggcaggcaagtgcacagcccacgccgccagcaagagagacgatgagaatcgcccaattgttgtcacctgaaacaattctctttgttagccagaaatagataaagtcggacagtaccaccgcaatcccggcaagcagccaccgacttctttgaatcagtattgtctttgttgtgctgagtgcattgtcaagcacctttgcaaggaatagtgcaccatagtagattaggcttcccatatcataaaatcactccctccatagaaaaagccgcctgatttctcttggaaaccaagcggctgcgtaaagattatttggttttgggtcgaaatcagatcatccacatggagacaatgtatgtatcaaatacccgctcaaagagcgtcgggatctttttcatgataccttgcatctccttctataatctcatccagtgttctcggcgtatagtccatatacggcatcatgcaaccgacattgatgaagtttccgttcggtgtgccatagccggtggcgtttgcctttacctcacgccgaagctttgcaatatattcgtactctatggtccgatggacatgaccgtagagcatgaatgcagttggggcaaaacctgcacggaagaatgggatcggataatggcacatcacaacatgcttgccgctgtccttgatttccttcaagtccgtaatttcctgaaacatgcgctttgtggcggcgctgaattgcttgggatcgtgattgccccgtatcagcactttattgccagcaagtgaaccgactatggatggccactcgctttcctttgcccagatgaaatcgccaaggatgtatactgtgtcatcgctgcgtactctggcgttccaattctctatgagcttgttattcatctcattgacatccgcaaaggggcggttatcaaaccgcagaatattttcatgcccgatatgcagatcggaaatataaaagtttgccaaacgcgctcctcctcatttcatcaccttgataatcaactcgttcacatcctctgttggctttccggcagaaagtagcttgttgcgaaaagcaagaagcgcttcccgcaacagccgcgcctcgtcaggggacagctcaacaattcgtttctcagctttacggcgaagcatttgcagcacctccattcctttctgcccccattgtatccgcaaatgcgcatcatggcaaatgtgcgaatgaaattcttctgaaaagcgaatacggcagcctgttgaaaggctgccgtggatcgacaaacaggaagttagcgatttctttttccggtattctctgtcccacggatttcctcatgatagaaataatccacgatcaccggatgtccctgcgggactcttccataaggcatttcattatccgcaaagggacaatcatacttcttagccatttcctcagcttttacttcaagcgcttcaaagtagctgcggttatgcttgttatagatctcatcgtaaagcggtacaagatcagggtattttccggcgatataatccatgatcgtctttttgaagccgcctcgaagattgaggttttcgagccagaacagatcgcactgatcctttacccgctcaaagatggcttcaaagtccgtgataccggggaataccggggatacgaaacagactgtacggatacctgcatcatatacctgcttcatagcagcgatgcgccgctcaatgctcgaagcagagtccatatcgttcttgaaattttcatccagtgtgttgatcgaccatgaaacggtcactcgtccaaggttcttcagcagatcaatatcccgtaccacaagatcagactttgtgcagatcaaaatatctgcgtcactgccgatcaactgctccagaagttttctggtattcccgaattgctcttcctgtggattgtagccatccgtcacagaaccgatgaccacacgctgtccggcatatttcttcggatttttaattttcggccaatgcttcacatcaaggaaagtgccccattcctccgtgtgtccggtaaagcgcttcataaaagaagcatagcaatacttgcaggcatgtgtacagcccacatagggattgaccgagtaaccgcctaccggcagactggacttggtcatgatgttctttgtttccacctcacgaatgaggattccatcgattacttctgccatgatctctgtacctctaacactttattgaattcctccggcatttcctgaatcatattttcatcccctatgatagggacaaggtcttccttcataaacaccggaatgccgagtgcgtgtgcctgatccgtcagagaccatgcccattccggctccgtatgaaccttcctgctctgagtcccggtcatagtgccgacaacgatccagttgattccggaaaggtcaactgtaccgggatcgtcgaataacggttcaaaggtaacatggtaatgctttgctctgatgtttttccgaagggcgtcgatacgccacagttctgctttcctcgtcaccgtaacgccaaaccatgcgttttccagatcggtatcaaaatccagcaaatcaggtcgcttggtcaggaacaggaactgatgctgtggattttcacggatctttgcaaatacctcgtctctccattccggcttccatccggacagatcgctcatgccggtaagaagaaagttctgcggacgtttcttttccatcatcttgagcttacccggaaagaattcagggtcagcgaagtcatcaatcatatgccagcgtttcacgttgttgcgggcatagcaatatgtacaccccactgtgcagccgatgacgagattcatgttctgaatctgatctttgatacaaatactcatgacttctgccactcctcaagattctttctgatgcggtcgaggcattcctcaaaccgggtaatttcttcctctgaaaaacccttgtagtaaatgctgcccatctcatcagatacagaatcgtactcgccctttaaggcatgtgctttctcagtcagaaacaggagggttttccttttgtccgtttcagactgaacacggcttatcagcccttgattttccattctttccagcatcgtcgtaagagatgttatcgctaatccgcatttagtcgagagtgatctgattgagataccatcctcctgccacagcacataaagaatgcgcccctgggctccattgaacgcatcaatattcttttcgctgagaatcttctcaaaaatccggtccccaagctgttttattttggtgacaagaaatcctccatttgttttcatgcaaaagctcctatatagtagtttataaaatcatactatataggagctttattgtcaagagcttgtatgcctgaatagaggtaaattccgatttgtcagcctcattctatcgcacactcggtacatttcccggcttgcgtatcacagcggcaatgcaggtattccacattgccgctgtgattttctttttagcgttctctgtctgcggatgatttttgcggctcctcctcacctcgctcaccgtccacgatctcattttccgtcttatccaggtttagcagggcgttcagctcgttcagacgggccgttttcgctgcaagctcttcctcctgtgggaatggcttctgcacctcggcctttgcattttcaagctgaacccgggtgttctccagctgctcgacacacgccgccattcgttcctcaaaagcgccgaacgtattatccagtcgctgaatattgccgaagatgtccgagcccagcgtgaccttatgccgcagctggtgaatcagcgtgattttatattcccggctgaaggtatcgaaggacagctccatatcaaagcctcggtactgaccgatgggaatcgtgtcggggcttgtcatggacttgcaaaggccgaggatggcatcgccggcagccttcttttctcttaccgtgccgcccggcataatcatgggagagaaaccgtcctcgttgggctcggtatttcttttgagctggtcaatatccgcctgatagccctcaatgcgctgctccaacgatttgattttctgcggaaactccttcagaatttgatcctccagagcatagcgctggctcagatggttggccttgagcagcttcagacgggacacatcaatgtccagatccatcttctccttgatgtggggattgccggcgcacagcgccttgatttccgcatagctcagggcagtttcgtcaatgtcctccgcagagcgcaccggggatttgctggtcatgatctgcccaatgaacttctgcttggattccaccaactgatacaggtagctgtcgaaggtgttctccgtaacataggtgtaaatatcgacctccttgttttcgttgccctggcggatgattcgtccttcccgctgctgcaggtcagacggtcgccacggacaatccaaatgatgaagtgccgcaagcttcgtctgcacattggtgccggctcccattttctgcgtggaaccgatgagcacccgcacctgaccggagcgcaccttgccaaacaactctttcttttgcgcctctgaattcgccgcgtggatataggcgatttcctctgccggaatgcccttggcaatcagcttgttccggagatcatcgtacacattgaacttgccgtcgccgtggggcgtagacaggtcgcagaataccatctgtgtcgatttctgatcggcggtgcgctgccaaatatcaaaaacattctccgcacacgcgcccaccttgcttgtctcgctgtcggggagcatatcgttcatgagccgctgatccaaggcgagctttctgccgtcattggtgatgaggagcatgttatccacgctggaatccaccatcttattgcggacacgctcggctcgttctgaaagagaggccaccatttccttttgcgtttccgatggcttcaaaacaacgctgtggtaatgggcctccggcacggggagcttgagcatatccgccgtttgaatatctgcggtctccttgaacattgccatgagctccggcagattatagaacttcgcaaaccttgttttggcgcggtagcccgtgccctccggggaaagctcgatagccgtcaccgtctcgccgaaggtggaggcccaggcatcgaagtggagaaggtcattcctgcgcagcgctccgtactggagatacttctgcatggtgtacatctccaccatgctattggagatgggcgtgccggtggcaaacacaacgcctctgccgccggtcaactcgtccaaataccgacacttcatatacaggtcgctggacttcatggcctcggtttggctgatgttgcccacattccgcatttttgtaaatgcggcgaggtttttatagtaatgcgcctcatcgatgaagatacggtcaacgcccaactcctcaaaggtcacaacatcatccttgcgggactggtcattgagcttgtccagcttctgcctgaccgttttcttggttcgctccagctgcttgatggagaaattatccccacggtttttcttcaattcagaaatgccgtccagcacttcatccagctgttgctgcaggatggcacgctgtcgttccagggacatggggatcttttcaaattggctgtgcccaatgatgactgcatcgtagtcgccggtggcaatgcgcccgcagaacttcttgcggttcttggtctcgaagtccttcttggtggcgacaagaatgttggcggaggggtagagctggaggtattcgctcgcccattgctccgtcagatgattggggaccacaaacaggcttttttgacacaagcccagccgcttgctctcctgtgcagccgctaccatctcgaaggtcttcccggcccccaccacatgcgcaagcagggtgttgccgccgtagaggatatgggcaatggcattgacctgatgcggcctcagcgtgatctccggattgattcccacgaaattcaggtggctgccgtcatactcacgggggcgaatgctgttgaacttctcgttatacagcttggttagctgctcccggcgttccggatcgctccatatccagtctgcaaaggcctgcttaataagctcctgcttgccctgtgcgatggcggtttctttcttgttgagcacagccgttttcctgccgtttccgtcctcgatgtagtcgaagattcttacatctcggaggttcagggtttcctccatgatcttatagccattaactctgccggtgccgtaggtgttgtgggcttttacattgctgcggtcataggatttcccctccacattccattcgccggtgtactgcgcgtagtgaacatggatgttccactggcagtagcgtggggtgctgaacagttcaaacatgaactcctcaatgatttccggaggcagccatgttgcgcccaaccttacggaaatctcacttgccgtcaggtcaaccggctgcaccgcctcaagcgcacgaatattctcaccgtaatcttcggggtagagctccgcactccgctttgcccaacggagcttttcacggacattgccggagagatattcatcggcagggagatacttcggcttgccgtcctcttcgcttatgtgcatggggttgaggaaaataacacccttcaaatcctcgaacagctcctgctcggttttaccggtaagctgcgacatatatggcatgtcgattctcgctttttccgaaagggacagagcataggcctcggaagccgtgtcaaccgactgcaccgttaccttctgcttgatggttcgtttggagaacatatctgccttgcggaggaagttgccctcatcgtccagcacctccagcgaagcaagcaggcagtaggagctgtcggaattgaatgccgagttgttggctcttgcgctgataagcccatattttttgctgaaatcatcatagagccgattgagcttttcctgctccgccttgatatcggcatcgggataatcctccgtctggtactcaatcagcgtccggacacaatctcggatagcaatcatgcctttgatgcggctttcggcagtcgcggaaacatccacgggattcatgcggctgttttcacggtaatagattttaccgtccaccaccgtgaagctgaaattgcgcacatcagggtcagcgggaatagaaaggtcctcatcctccgcttcaagatcgtcgatttcaaattcggtaatctcggcatgaatgttctggatggcatcccgcaagaggtccccaagctctgcattttcataagcaatacaggcggactccatgccgtgaggcccgctgaccatctgcatgtcgcccagcaccatttcagggttgtccacaaaataggcgttcatccggatgccattggcgtcggtggccagatgcacccaatcgggctcaatatccaccaatcggtcacgcttttggaggaagataatgtccgatgtgacctctgtgccggcagcggccttgaaggtatcattcggtagccggatagcgccgagcaagtcggctctctgcgcgatatactttcgaacattgggattttccttatccagcgtaccctttgaggtaatgaaggcgatcacgccgccgggtctcaccttatccaaagtgcgggcaaagaaatagtcgtgaatgagaaagttgtgcttatcgtagcgcttgtccggtactttgaactgcccgaaggggacattgccgattgcagcgtcaaagaagctgtcgggaaggtttgtattctcgaagccctgcactgcgatgctgtttttctgataaagctgctgcgcaattcgcccggaaatactgtcaagctccacgccgtagaatttcgcgtcattcatgctttcgggaacaagccccataaagtttccgatgccgcaggagggctccagcacattgccggtctgaaagtgcatgttctccagggcactgtacaccgccttgatcaccacgggcggcgtatagaaggccgtcagcgtggattctcttgccgacgcatattcctcatcggaaagcacattcttcagctcggtataatggggattgtcctccttgaagaactcggatagaccgccccagcccacatagtcggcaagcacacgctgctcggtgggtgttgccaatcggctttccgcatccagcttattcagaagctgaatggcacggatattgtgatagaaccgttccagcggcgtgcccacgccgatatcatcgctctcgatttggaagttggttcggtactcggtgttgatctccgggtgcagcacatgaggcgcgatcttggaaggccttttcacttgtagaggcggggcaagcgcttcttcctggtcatccagcaaggcctccgcattggggtaggtcacgacctcgccgtctttgacggtgctgatgggcagagcatccaattcttcgtccgttaggctctcaatttcggaatcgtcttctgccaaatcttccgtttctctgaatacccgtgtgccgtccgcaccaaactccgcctcatatcggtcagtctctcgcgctgcttcccggtctgcctctaaagacagaatatcctcgtgaatcttcaggaggttttccggcgtgaactcgataaaatcgcagtccatctcatagtcattttcagcttccatgaagaacggagtattgatgtccgcaaggaactgatccgacatttcttcaaggtcatttcggaagtcggcggcgttttccggatggttggcaatgtcatactgctcgacaagctcttcaaaaacagagaaatcaaggtcaccggaaacatactgtccacctgcatctgcatcgggattgaagtaaatccagtgaaccttgttactgccggtgtcaagggatattctcgccttcgtattgtctgcgacagggggggcttccacgacttgcagcagcttgtcattcagcggattttctttgagccggttatcgaactcctcacgagacagttctttgttaaacagcgggaactgtgtatcaaagaggacgaccttcttttcgtcaaaagacagcagctcgtattcctgcgtgccgatatagaccgtgtcaccaagatgatagcgatattccttccgggcctccgggggagggttcagctcatcaaaggtcggctcaagcggctttgccacatcgctgttcaacgcttccagcatggcttcgcaccgtgcggtcaggtgggtgttgtccgcaatgatcgtattcattgcttcgcgcatcatggggaggatgaagtcaccctccgcagtacgggcgtgcattttcttttcgcccacgctgaacgcactccaacagctcgacaaataatacagattcagcgctttgctttcctcgccaagctgcgccacaaagtcattgtaatcatagacaatcgaccggaactcctcagagatttcacctcgtttcctccgagcttctgcctgctcccggtaggcaggatagttgtccttttctgcttggctcagatagcggtcggctcggatcaattccccgatccgcttctcggccttattccaccgcaaaagcaattctgcatcgggctgagagattctgcctctgctgattttgattcccttggcgtcgtggctttcatcgagatttctgccggaaacggcaggatacgcgccgccgatgccgtattcgtttttcaaaaaggcgatattgttctcagaagaatcctgtttgagaaactgctcatagatgcggaatttgccctgatggatgccgctgccccgtgtcagaatggcgtcgatgtcctcctgagaaatagcaaaagcggaggatttttcttcctccgcttctgcgatgatttcctgttgctgttcaactgtggggagcgttacgcgtagatcagatcgttcagaatcacttcctccgccgagtggcgaatggagttcatcatctgcacccatcgcatctgatcctccgccttcagctgctccgtcactccgttcagcgccttcatctgctcggtcaggtcgtccagcatcttctgtgcctgccggtccacctcctccagatgactgttcagtgttccgttcagcagcatcccggtgtagatcccatcccggtgctcgcggaggaatgtccgccgcagcattccatacttcccaagcttcgggctctccggcacggtcagatcgggaatcagataatccccctgcatcgtataggtcagttccatattcgttgctcctttccttgttttccgttcggttcttatgatacgcagaagtaccctcctgtgcaaatgtgcgaatcttccgtctttcttccttctccatttccttgacggtttcgcccatttcccggatgaccatctcagaaatatcgctgactgcggcaccgagcacggagataacctccacggtgttgaagtcaaagagatggctgaaatcctcccggtcaaaatactgccttggctcataccccgcacgggagagcgccataaaagcgacgctgcttttcagcgtggttttcagccatgcctcaaggcttgtgtcatccagctcctccagaaagctgccggctttgacagcgttcaactccatgagataatctgaaagattatcctccacggcataaccggaaatatccatgagaaggtgcgggaaatctcgcggctcctccacatcgccgaagctggcctgaaggctttccgataccgcatattcgtactccggcttcatctgccaaagggtgatgttccttccggcacggctgttggtgtcggagatatcaaagacatgtctcagcttgtagggaacatctctgtcgatcagcagcgcgatgcctttcgtgcccttgtttacccatctgccgagtttattccatgtgtcgatttccgcacacgccgttgcatccggcttctgcgcatggatgagcagctgctccttaaagctgtacttgtagttgtttgccgccgtaatcagaaaattggtatatcggtcggcattggaggcgatatccctggcagtctgggacgccatctccaaaatgattctgtatttgctcggcatgggaactccctccttatcttactttgatcgtgacctcaacggtctgcgcattctctccgaggatcgacgcaaataaaagcccggttctggcgttggataccttcgtcacaagctcattcagccggcagacggtggtgttgatttctttttggttgtctgcgtaatagtagcccgtttcatcgctgcaaataggaaagccatcctgccgcaaggcactgatcttgcggcgaatatttcgtccgtcaagcagaaacagcttttcaagctccttgctgtggatggcattttctttgccaatatgatttttgcggagatattcgcagatggctttcttcttatccatagcttctccttatctcgcaggttcgtggtctttttgcttatgaaccgccggtggattcttctccatgtactccttcacggtagtaagcgtgccctcatagttccaatcgttttcaggatcaatgtcgcggtaggcgtttctcccatccggtcggggctccaagcgaatgggtctattggaaatcaatgttccccaatgattcaccatgatccagttggcaatctgaaccggctcgccctgttggtcatcatcgtggcgaacctcgtacatgtacatgccctgtggaacggtatcacggtctacccgcaggcaggtaaaaagcatgggatgccccagaaccgtcacatcctcaaacttctctgtcatggcatttaccctcatcgtgcttcacccctttccttcggctttctgtgggaactgtcctctacgaaaagtccttttggcagtgtatccaggtcgttcagaaacgcacgggaaatggtcttgccgttccggtctcggtagagaacgacgcacagcggctctccgtgatagagcgactccttcaggtcttccaggaagcgctgctcatcgctgtactcaacgctgctgcatacttttccgttgaaagccaaatagtccagtctggcaatataactttcgctcggcagtgcgtggttcatcgtgcttcacctcgctctctctgcctggttggaaagctccagccgtacacttttccgatctcatcgccaagcctgcgggtgacacggagaatgtctgccctggtggctgtgccgttgtagattttttctttgagccggtctttctgcgcctgggaaacattgtccttatatacccgatagagataatggtttgtgccgtcatggtgggtgtcatcgcaccggaagtctccgtttcggtccacataccatgtggtgtagtcgtaatcagagtaaaggcagtcccggatattgccgctgggaatttctttgtatcccgtgcgcctgccattccaaagccccagatcggcaacaaccagaatgggctgggaaagttgaatgtccagattgagccgttcgtcctcaaggtagtgcccgttttcctcatacatcatggcgacgcgctcgtcatcggaaagcgtcggatattcttcctccatccaatctttccactcctcatagtcaaggtcggcattagaccagatacgataatcgtccttactcatcgtgcatcacctctgtccttcggcatcacgggctttccgtctgcgtcataatttctcgggtctgcggcgggcacctgaaagccgaacatagagccggccttcatcgcttcttcctgcgccttgctgacgccgagctttgcattatactcattcgcgatgctccgggcttcgtccttgtcggtgacgggaatgtccgtcttgaagtagcccttttcgccgcgcttgatgataatgatttcgtcgctgccggaaagaacgctgtagcaccgctcgggcaggttgtcccgaaccggctcgcaggtatggccgccatattccatgcgctcggcaaactcgcagatgtgatagaggttgctcccgatctccacatggtagtcgtcgatatagcggcaggtgcggatctgatcttcattccacgaatagtggatttttaccttgccgccatccggaatgcgaaacagctccttgtaatggctgtcaataaaacggattcctttctctgcgttcttcaggtgctgatcgagccaatcccggcgatagcaatagcagtataggttgtattcgcccctgtccgggttcaggcgcagaaggtaggcatacttttcggtatccacgcggacgccatagtagcccggctcctcctgcatacggctttggggtgtgcaatagcagtacttggcaagcgccctgcggttatgaagaatgtcgccttcctcacgcagagagttgattacatcatcaaactctgccttgaactcatcggttttcagctcctcccggaaatcaaaccagctgctgaaaaagccgttgccgtctgtatccatgtctgcccggaggtggccgatcagtccggtttgcatggaaatctgcgtgctctggcgaaaggtatatttgtcctccgcctcgatcattgctcttttctcatattcaatcatcttgcgtcacctctttctttagtcggtttcttttcctgcgcgtgtatctctttcgctttctccaagcccttctgcgcccattcgggaagcttcttttcatccatgacaccgagaaaatccgtgcggtaaaaggaggcctttctcccgtcgtacagagaaatgcagcagcaggtacggcctcgcgcatttgcctgcgcaccgaagccgccggtacacagcataagctggtgattggcgtggcggaactcaggccggagaatgctgcccttgatgacaaccaccttgttctcaatggaatctttgtaggaaaccggcgcgcagctttctgccatgagttcctcatttatgccgacctcctgacaggctctctcgttttcctgaataatctcctcggctgcatccgcaacgcgctggccgaacacctttgcaatctctgcaaaatcgtcgctgaccagcaccccggaatagcgctcgaaaatggcgttggtctctacgaagcagcacatataccgttcatccttgtcggcaccggggttctcacccagtgcaatatccttgtgcccgatatacatggaatactttacggagtaatctccgatttttcttgtctcttccatagcgtctccttttataagcggggcggcatctgtaaaaagatgccgccccttgccgttttactttctgttcttcaggcgaagaacgatcagccctacgataataaacgccacaagaccgatgccgatgatgaccttagcgctcatgcttgcctacctccttcttttttcggaaggtaaagaaagccgccgcacctgcgccgattgcagagataccggcaagtgctgcccaaagaggcatattggtggtatctccggtcttggggatatccgtaacaggcttgagcttgttatggaacttggcaacgaccgtctttccttcgtgaacggttacggtgacatttgtgggaagctcatacttctcgttggctttgttggacacctcggagatcacataatcgccgatgcgcagcccctcgatgtggatctgacccttctcatcggtcacaaagtccttgctgaaggcattgccggtgatatccgtgccctccacgcggaaggtaaagcccttcagcacgccgtcatccgaagtcttttcaatgcggatgcctccggtctgtgcctggttgacaaagccctttccggcctcattttccacgacgacggttttaccatcttccttaatggagaaactgtaggtcttctcatcaaggaagaagcccttgggggcctcagtttccttcagcgtgtaatcgccgtagggcagatcatccagcttgtagacgccgtcggacagctcctccatctggcccacgagctttccgtcacggtacacctcaaagactgcgccgttcaggtgatgatcgggatagtctttatccaccttggtcagctgaacgctgccgcgaatgagcttgttggtgatctcgatctcgatcacagcaccgttctgatctaccttcacggtataaggcgtgtcatccatcacatagccctccggtgcagcgatttcacggaccccatactcgccataggggatacctgtaaaggagaagctgccgtcctctgcggaaacggtggtcaggataggctctgtgccgtctgtgaggaacaggccgatggtagctccggccagcgccttgccgtcctcatccttcttcatgccgtggatctctccgtagatcagctcgttggagatgctcctgccgtcgttgaccaccagctccaccatgggaatgtcctgcccagcataggcaaaggccacgggatacttctcatcggagaggatgtagtggctgtcggtgctgatttccttgacatagtagctgccgaagggaacatcgctcttgagcacggctttcccgttttcgtcaagggacagaatctcaatcagtccgtctgccggaatgacagagccgtctgctgcggtaagctcctcggcggcatagaagccgaaggtcacggcggaaagctcgttattcataccgataccgaactgcttattctgctccagcaccttggaaagagaaatccgcgccttctgtctgtcattgcagaagctggcagccgtttcggtgatctcaatctcctgcccggcatagacaagctctgcggtatgggcgtccttgttaatgaccatgccgtcgggggctttcatctcagtgatttcgtattttcccagatacagcggtttgctctccgccgtgccatctgcgccggtagtcaccgtatctaccacctcgccggcgctgcagcgcagcgtaccgtccggagtgtagatgtccgccgctgccttgatctcataggttgctcccgcaagtccctgcaccgcatagaccggctgatagaccccgtccgccgccgcaacagaggcaaacacctcaccggttttggaaatcttgatgatgcccttctgcgcgtagttgcccagcttcaccgcaacgaccgtcacgccgctttcctcggcggaattctcttcggtcacatcgaacttgaccgcctcatgactgagcacatagccgtaaggagcggagacctccttgagggagtagcccttgccaaactccagcttctccggcgtgatgagcatgccggcgtcattggtgtagaaggtgtcgatggtggtaacctccggataggtaaaggtcatttccaccttggagccatccggacggaagatctggaagcccgcacccgcatagggaatggtattgccggtttctgcgtccaccttgatgaccttaatgaaggactcgaagttggcattgttgataaggtagcggtaggtctcaccgtccttggcaatgaacacatcaaagtcgctcatcagctcacgaccctcccagccggaaacctgatgcacggtgtacacgccgtagggcaggtccttgctctgggcaaagccgttttcatcgcaggtcaggtagtcccgctccgtatcctttgccgcctcatagctgccggcagatttcagatatacggcgaacactgcaccctcctcgggagtttcgatctgtgtatcgccgttatccgagtgcttgatgatggcgatattgcccttctgcacctgctcggcaacagccacagcaggtacagcgttcagctcaacggtgtaattggccgcctctgcaccgacaggataaacggtgctgtccagcagatagcccttggaggggctgatctcacgaatcgtccagtcgtcgccgcagacataatagccggtggtgaactggccgttctcgtcggtgtagtaggtatccacaagctgatcgcccttatagatgccgtaggcggcaccggcaagcgaagcgtcgccctgcgccgttccgacctcacagtcactcttagtgacggtgacattgaatttcttgaggatgttggaaaagctcttattggttacactgttccattccactgcggcgctctggctgttgggaaccacatagcgaatggcggtgtccatctcctccagcgtgtagccggtgccgataagcacatccttgaaagccgccacaccgttttcatcggtaacagcaaattcatctacaggcagaccactgagagaggttccaaaaaggtggaacttcacaccctgattcagcccgtcctcggaggtcttggtcacggtcagatcgccgcggcggagtacattgttgaaggaaaccgtcgccgtctgtccggcgagcacggtaatgcggtggctttcctggggcacatacttgtcataactctgctcagtgacggtatagacaccgggcatcagattgtcgatgtgaatttcaccgtttcggtcggtggtaacgctctgattgacgccctcgccggtgatggtgaaggtaatgccgtccaccttgccgtcctcgctggtcttgatgattttagcgccgccatagctgaccttcagattcagaaaggctgtgaccgggtcgctgaccgtagcgctgtaggtaacaacatcctgcatggtgccgtccggaccatagtggccatcgctccacaccacgacgcccttacgcagagcctccttttcggcagtgacccggagcgtagcattaggggcattctgagttgagatcgtcagcacattcccctgaacagagaaggacacacctgtttggttagcagagaaacggtaattgcccaggacgccgttggtatctgtcagcgtggccgaatagcagctgccgtcccagttcagctcgacagtctgtgccttgccggtacttctggccatgaagctgggaacgatggtatgcttctgcacgctgtcctcaatgctgtcataataagcggaaaagcggctgtacagcgggtggctggtgcggtaaacggatttcactgcgtcggcactgccggggtccacatggttgaagttggcatcccgctctccaacgaccgtttcccacaccaacgcctgggtggccatcatgtgtgccagtttgtcggcatccgcatcattctgcgatctccacgaggtggaaagattgccctgataaccgtactgcatgatccggcccagcagggttttgatggtgtcagcgtcgatggtgctgttgcagtcggacgggtagttcttccaataatcctcgccatggcgggaatatgtcttgcccagcaagcggggcacgcccggctcaatgcagtagcaggcctgtccatcgaaggagccgatggtgtgcagcgtggtcatccaggttgcctcgccggaggtccagccattcatgtagtgaagctcatcgtgaccccatgtgccgctgtaatccagattggcgtccccgtctctggggaagcctacggaataggactcagcggtttctccggcagtcgaggcagcaaaggccgtagtcgtgccgatgcccatgagcgcggtgaatgtcatcaggactgcaagcagtcccgatattccccgtctgaaaatgcttgttttcatattagtttcattcctcctgaaattgaattttggcatgaaaaagcgccgtatttctacgacgcttctcaatgtggtataaagttttatgtgtacccgatataaatcaggtaacttcctgtgccgatgcattcgtaccaaatacagatatccgtgatactctcgtcctcggcatatcgcttcaagcgcgagttaatgtctcgctccagatagatgcagccctgatctgcggtgatcggattgtcccagcattctgttgccgagttctccaaggtcagtcccaagctcaccgccgtgctttttgcgtaggaaatccagtgctcgatatcaaatgcgggttcagtttccggagtcggttccggctcggttatcgcaggaacggacggctcctctttcggactttctgctttctccggcttctccggaagcacgggtgcctgccggtcttcctccggtgtcggcgcgttcgattctgtgggtgcacttaccggctcagaagaaaagctcgggctgctatcgtgcttgtcctcatttggtatgcaagctgctggatcggcggcttctgtcggggctttggtgtgagcgcttgaatctgtggataccggctcaaaggaagcaggcgtttcttcctgtggcgttggagctttcgatgtgtttcctgccgtttggccttgcgagggctctgcggcgcatccggaaagcaatgcggcaagcaggagtgcgcacaatataagaagctttttcatgggatgacctccaatgactgtttttctcatattgtacgaatgcgctttgttttcttcaattgtgccgcctgtatattttccttttgagctggtattgccggtaaatgaaggggagagtgtgagagggggaacggcgtcggtgcaccgtcaaaagggtagactgctcccttggcgaagaacctatcttgcgtcattccgacttttctgccgttcctgataccggtgataatactccagcgctttcagaatatactcaccggttttttcgtagggaacgctggcagggataaaccttctggcctctgcgtacttgatgttgattttctccctctggttcggcttttcctcgctcatgatcgactcgatgacctcgttattcagctttccgtcctgagagaaccgcttcagcttaatggcctgggcaagggacggcgtggcatctgcataggcaatttgctccagcagcgcaccctgttcttctttttgcaggtacgaaagctccaccgcaggtctgaacgcaatgcgtccttcatcaaccaaatccagaagctccggaatgagctccgtgaggcggatatagcgtcgcacctgttcgcggctttcacctgagtcgtttccaatcctcgtaaccgatagtgcttcttttcctgacaacttctccaccactggtgtagaagttaaatctgtgcgctggccctgtcggttcatggcctccaagcgcatcttgtacgaaaaagctttttcactgggcagtatcacagagcgctgcaggttcgattccaccatcaaaatgatggcctcgtctcgggtcatctcccgcacctcggccttcacggtgtcaaagccggcaagctcgcaagccttccttctgcgatgccccgacacaatctcgtaccgcccatcctcctttggtcggagggtgacaggggtgatgatcccacgctccttgatgctctggacaagctgatccatgtcctcgtccagcttcaccttgaaggggtggtcagggaaatcgtcgatctccgagaggggaatatcataaatgcgcgggagtttattttcctttcgctccgcgtcattcatgaaaagctcatcgtacccggtcaggcccagatcgattttttgcacgctcttcaatctctgtcacctccttcgtcagagcctcatacgctgctgcgaccttgccgttcctgtcatgggagaagatgctttctccggaaagactgcactccgcagctcttaccgagaagggaatttcggaacggaacacgcggatgttctctcccacggcggaacgaagcgaggaaataatcgccttagcgttgttggtgcggttatccaccatcgtcagcaatatgccgtcaatcttcagcctcgggttgatctgccgcttgatctttgaaatggagcgcagaagcaggttaagacctttggttgacaggaagttcggctgagacgggataatcacactgtctgccgcaaccagcgcgttgaccgtcatcatgcccagagagggcatacagtcaatcagaatgtagtcgtagctttttctcatgccgtcgatggcgttcttcaaaacatactcacggctcatgacattgaacagacccgtttccataccggagagttcgatgttcgagggaagcaaatccacaccctcctggtgccggataatggcaccctccgcaagcggctcatcatcaatgaccgactgcataagggaagacagcgatacatccagctcgtctgggttctttacgccgaggctcacggttaagctgccctgcgggtcagcatccactagcaggacccgcttgccagagcttgccagtcccacaccgagattgactgtggtcgtcgtcttgccgacgccgcccttctgatttgtgatggcgatcaccttacagttttccatggggtttcctcctttctgtgaatttgaatcatttctgatccacgaaagcctcaaaacaccttttggggctttcgtcgctgcatttcatttttcctcgaacccaaaatgcagaaaaggaagtcatcagacgcccgatagcgaatcgggtccatgggaatctcacccccgccgggtactccgccggttccgtagaaaagtatcattataccctaagcctgtcgtggccgtatccgtagctgccagatatttcagaatggtttcggggtcgctctccaccttgtgtcccgctgataccgttagcggcaggtgggtcttggcgtaccttcatttggctgttggctcaaggaatgtatctgatgaatgtatatgaaattttcaaggttcacggaaggctcatcgccttctcactttctctttgccgaatttttttgcgagattcccacactttttcaaaaaaattttttgtgccggttccagaaaacaaaaaagcgcccactgcacctgtttagtaggcgtagtgagcgcaaaaaataagacccggtgatttctcaccgagtctcatatctgaatatatagttttcaaaaaaacagccccgcagaatcacttctgcgaggctgaaattcaatcgcacatttttctcggcatccgtggtgcacccttggtgtaaattggtgtacggattggtgtacgagaggctttttagctcgatcagggggcaatcaatagagctttgcgcctgccggaatgtgaggatcgaccatcagcagatggagcttttcttcgccgttttcgtgatgcacagcggagatcaacataccgcaagagtcaatgcccatcatcgctctcggaggcagattggtgattgcaatgcaggtcttaccaaccagttcttccggctcataatattcgtgaataccactcaaaatgaccctatctgtgccggttccgtcgtccaaaacgaactttaagagctttttggacttcttcacggcttcgcattccttaaccttcacggcacggaaatcgctcttggagaaggtgtcaaaatccacctgatcctggaacagcggctcgatctccacattggaaaaatcaattttttcttcgacgataggagccgcttcaacggacttttcttccgccttggtctcggccttttcggtcttatccttgtccaaaggtttcattgtcgggaacagcagaacatcgcggatcgaggcggaatccgtcagcagcatgacaaggcggtccacaccgaagccgaggccgcccgtcggcggcaggccgtattcgagcgcggtgatgtagtcgtaatcgacctgcgccttgcaggccgggtcgagcgcgcggcgctcggccacctggcgctcaaagcgtcccttctggtcaatcggatcgttcagctcggagaacgcgttgccgaattccatcgcgttgatgaaatactcgaagcgctccgtaaaggcggggtcatccgtcttgcgcttggcgagcgggctgttctccaccggataatcgtagataaacgtcggctggatgaggttctcctccacgaacgcgtcgaagaactccgcgaggatcgcgccctttgtcgggatctccggcagcgcgaccttgtgggccttcgccgcttcgaccgcctcggcatcggaggagatcgccgcgaaatcgacgccgctgtacttcttgacggcctcgaccatcgtcatgcgctcccagtggctcaggtcgatcgccttgccctgatacgtgatctgcagcgaaccgcagacgttctgcgccacggttttcatcatttcctcgacgaggtccatcatgccgtggtaatcggtgtacgcctgatacaactcgatcgtcgtgaactcggggttatgcttcgtgtccatgccctcgttgcggaagatgcggcccacctcgtagacgcggtccatgccgccgacgatcaggcgcttcagatagagctcagtctcgatgcgcagcaccatatccatgtcgagcgtgttgtggtgcgtgaggaacggacgcgccgccgcgccgatctcaaacggcgtcaaaatcggtgtatcgacctcgaggaagcccttgccgtcgaggtagctgcgcagctcacgcagaatctgactgcgctttttgaaggtgtccttcacctcggggttcacgatcaggtccacatagcgctggcggtagcgcatgtccgtgttcgtcaggccgtggtacttctcgggcagcacctgcaggctcttcgagagcagcgtgaccgaagcggccttcacggagatctctccggttttggtgcggaaaacctcgccgcggatgccgataatgtcgccgatatcgtactttttgaaatccttataggcctcctcgccgaccatgtcgcgcgcaacatacgactggatcacgccgccgaaatcctgcacgttgcagaacgaggccttgcccatgatgcgctttgccatcatgcggccggcaatcgcgacctcctgcccctcgagcgactcgaaatccgcccggatcgcattgctgtaatgggtgacatcgtatttcgtgatcgtgaacgggtccttgccgtcctgcgcgagctgcgcgagcttttcgcggcgcaggcgcagaatctcgttgatttcctcctgcgactgctgcgcaggcacttcgggcatgttcttctcagccatttgctcttttcctttccatttccgggataaaaaaggcgggcggatccgctccaaccgcccgggattgattaagacacggagaggatcgtgtaaaccacgatgccgccgggtgtttcgacttccacgctgtcgccgagcctcgcgccgacaagcgccttgccgactgcggattcatcggagattttgccgagccgcggattcgcctcgtttgaaccgacaatgctgagctcgcgcgtggcctccgcgccgttttctcgcttaaaggagacggaaacagtcgaaccgatgtgcaccttatccgcttcctgctcgttcttttcaatgaccttcgcgttgttgagcatgacctcgaggtctgcgatgcgggcctccaaaatcgcctgatcgtttttcgcctcgtcatattcgctgttttcggagaggtcgccgaaggaaagcgccaccttgattttctccgccacttccttgcggcggacaaccttcaggtaatcgagctccttttcaagcgcctcacggccttcttctgtgacatagtatgccttttcagccattctttagcaaccacctttataggatattctgtatagggaatgaaatctcgccaatactttctattatagtgatttcatgtgaacttgtcaatgctttttccgcttcacagcgcgctttccggcaaagcaaggccacagcctgcgggcgccgcgcatttcttcccgccgcttccccctcgcgcttccgcacagcggcgggcgcggggaaatttcgtttttcaagaattgcattttaaggaaaactgtgctacaatgcgactgtattgtattgtatctccctcgggagaataataacaaggaggaaaactaaatatgaaacccaagttcaacgtaaagcagctcaccctgctggctatgctggtcgcggttctgctgctgatgtcgttcacgccgctcggatacctcaatatcgggccgctggcgatcacgttcaacgtcattccggtggcaatcgccgctctggctctcggacctgcaggtggcctcatcgcaggatctgttttcgggctgacgagctttctgcaatgcctcggcatcggcggcctgagctcgctgggctctatcctgttcggcatcaacccgttctttgccattctgctgtgcttcatcccccgcatgctggacggctttctgctcggttatattttccgcatcgtcggccgcctgaaccgccccgccgcctgctttgtaacaggcttctgcgccgcatttttcaacacgctgggctttatgagcctgcttttgctgctcttcggccgcaccgattacatgcaggggctgatcaacggccagaatatcctgatttttgcctgcctcttcgtcggccccaacgccatttttgagatgctatcctcgacgctcatcaccggcgcggtcggctctgtgctgtgcagggcgcggctcgtgcccgaagccgcaaacgataaagataaggaagattaacgctatggttctcgccatcgacatcggaaacaccaatattgtgctcggctgctgccgcggtgaaacggttctcttccgcgagcgcgtttcgacggtccacacgtccaccgtgctggaatacgccgcgatcctgcgcaccgcgtttgagatgaaccgcatcgaccccgcagacatccacggcgcgatcatctcgtccgtcgtgccgcccgtgaccagcacgatgaaggccgccgttcagaaatacctgcacgttgcgccgctcgtcgtcggccccggcatcaagacgggcctgcgcattcaaatcgacaaccccgcccagctcggcagcgacctcgtcgtagacgccgtggcgggcatccacaattatcccctgccgcagatcatcattgatatgggcacggcgacgacggtctccgtcatcgaccgcggcggcaattaccgcggcggcatgattctgccgggcgccgtcgtctcgagcgattcgctgatcagccgcacggcgcagcttcaaaaggtcgcgtttgaggtgccgaaaagcctgatcggcacgaacacgatcgactgcatgaagagcggcattctgtacggaaacgccggcgcgctcgacggcctgatcgaccgcatcaacgcggagctcggcgagccgtgcacggtcgtcgcgacgggcggcctcgcgggtgtgatcacgccgctctgccgcaacaaaatcctgctcgatgacgacctgctgctcaaggggctcctgcttctctacaacaaaaatacgcctacagactgaggcaatacaatacacgcggccggtgcagaaaatgcgccggccgtttttatgcccgcagaaggccgcacaagcattcgatgcctcagggccacgagactggctttgtataccgctcgatgcacagcgccgcggaaaacagccgctttttacctgcaccgtacagaacagtcgcgcgcggcatgccgtccgcatcagcaccaagccgcagagcaaccgacgaaaagccgcagaaatgcacgacgttcgtcggctccgtcatcaagcaggcatcaaagccgcgcaaagattccataaatgcggcgcgcgtataagctgggtccgcgatactgcttccgtgcgcagcagatcgatcccatacggcatttgcgccgaatcctcccccatactgcgccacgatctgccccagcatgcggttctctgcatttgttccggccaagtaaccctccagaccatgccggaacgcacagcgtatcgcgtccttctgcatcggctgatacggatgtacgaccgtcctgataaacacatccagcacgccccgaaacagcgccttctgtgcttcaggaaccgtttcctcccaaaaggtgttgaccgccaaacgcagccgtcccgcttcgggcgcatacagtggttcaagcgcctccgcacgcatggcgctgtagaccaaaccgcatccgcaaaggtgcgcgccggcagcccggcactgtccagcagcgatgcaatcggcacattgccgcgcccggaaagcgagctatgcgccgttttccgccgcacagccggccacaaaaaaagaggtgtccgtcccgattgccgccgcgcaaagcccgccgaaacagcaaccgcggaccccgtactggagccgctcggatcccctgcctttccatacgcactgtaaacctgcccgccgcgcgcgctgaaaccgttcggtattttcgacgacgtataattggcaaactccgtcatattggctttgccgaggatcagcgcacccgcgcgccgcaggctccgaatgccggcgcgtcgcgctccgcaaggttgtccgcagacgccggcctgtccgccgcagtgtgcatccctttcacatcggtgttgtctttgacaagaacccggctggccgaacagcgcgcctcctccagcacatgcggactcagccctgccagcacgctgagaccgtttggcccgccgtaacggacgaagcgttcaagatattcctgcatgagcgcttcggcccgctgcgcacggcggcaatctgctccggcaccggcattttccagatttcgcccgtattttcccctttcaggtctcacgtctcttcgccgcggtgcgcagccttccatgcttcgatctgccgcaggcgctcccggacgcgggcctcgctgccctcgccggtcggcatgtagtactttcggtcctttaaggaatcgggcaggcactgcatcgcggtgagcttgtccgccgtgttgtgggcgtattcgtaaccctcgctgtagtgcagctcgcgcatgagcttcgtcggcgcgttccggataatcagcggcaccggctctgccagcatcttttcggcgtcgcgcttcgcactttcatacgccttgtacagcgcgttcgacttcggcgccatcgaaaggtagacgaccgcatgcgtgagattgacagaacactccggcataccgatgaagtggctcgcctgatacgccgcgacggcgatttccagcgcgcggctgtccgccatgccgacgtcctcgctcgcgaagcggatcagcctgcgcgccacgtagagcgggtcctcgccggcctcgagcatgcgcgcgagccagtatacagcggcgtccgggtcgctgttgcgcatcgatttgtgcagcgccgaaatgatgttgtagtgctcctcgccctttttgtcgtagagcaaggattttttgctgatacactgctcgagcgtctccatcgtcacggtcgtttcgccgccctcgcgccggccgttgagcacgaccatttcgagcgtgccgagcgccgtgcgggcgtctccgttggcaaaggtggcgagcatgccgagcatttcgtccgtgatgtgtaccgtctggctgccgaaaccgcgcgggtccgtcagcgtccggcgcaggagcgatgcgagctccgcctcggtgagcgcctgcaaaacgaataccttgcagcgagacaaaagcgcggcgttcacctcaaaggaggggttctcggtcgtggcgccgatcaaaacgatgctgcccttttccacaaacggcagaaaggcatcctgctgcgccttgttgaagcggtggatctcatcgacaaacaacagcgtgcgctcgccgaggatggcgctgtggtccgcctcgttcatcacctcacgaatctccttgatgccgcttgtaaccgcgctgaaattgatgaaattcgcctttgtgcgcccggcgatgatgcgtgccagcgtcgttttgccgacgcccggcggtccccagaagatcatcgagctcacgcggtcctcctcgatgagctggcgcagcaccttgcccgcgctgagcaggtgcgtctgccccacgaattcctcgagcgtccgcgggcgcatccgcgtcgcaagcggcacgtcctgcttcggctgctcgaataaggtttgctgtctcatcgcttttcctccctttgcacctgcagtgcctgtgcggcccagcgcgccgcccttgatcgaactattgtttaaaatcagtatagcacgggcggccgcaaaaagcaagcaaaataaaacccagccgcgcgcaaaattccgcgtgcagccgggcgattgcattctatcgtattcttctgtatttcggctgggctcagcagagctctgccgcgagagcctcgatctgcgcacggctctcgtcgctcagcgcagatttcaccgtcaccatcgtttccgtgaaggcgaggttcttcgagccctcgagcagtttcttcattgttttcgccgccgtcggcgcccaagaaccgttctcaagcaggccgaccgtgcggttctggaaattgcgctcggtcagatggtcgatgaacgtgtgcatgaacgggaagatccccgcattgtacgtcgtggtcgcgagcacaagcttgctgtagcggaaggcgtcctctacagcctccgccatgtcgcagcgcgcaaggtcggcgactgtcaccttcgggcagcccttttcgcgcagcttttccgcgagcagttcgaccgccgcccttgtgtggccgtacaccgaggtaaacgcgatcaaaacgccctcgtcctcagcggtataggacgaccacgcgtcgtacttgccgatgtaatagccgaggttctcgcgcaggaccgggccgtgcagcgggcagatcatctgaatatccagcgccgccgcttttttgagcagcgcctgcacctgtgcgccgtacttaccgacgataccgatgtagtaacggcgggcctcgcaggtccaatcctcctccacgtcgagcgcaccgaacttgccaaagccgtcggcggaaaagagcaccttgtccgcactgtcatacgtgacgatgacctccggccagtgcaccatcggcgcggtgacgaacgtcagcgtgtggcggccgagcgccagcgtgctgccctcgcccacaacgatctgacgctgcgcgtaatccgtgccgaaaaactgcttcatcatggcgaatgccttggccgaggcgacgacctgcgtctcggggtatgcctccataaaccgcgcgatattcgcggaatgatccggctccatgtgctgcacgatcaggtagtcgggccggcgcgcgccgatcgtatcggccagctttccgagccattcgtcgccgaagcgcgcgtccaccgtatcaaaaaccgcgatcttctcgtcgagcacgacatacgagttatacgccatgccgttttccaccacatactgcccctcgaacaggtcgatgtcgtggtcgttcacgccgatgtagcggatgtcctccgtaatcttcaactgtatcatcctttcttttcccgactgcgcgcggagcgccgcacacgcggcctgcccaccgccgcaaaacagcctttttcgctcctattataccacagggcatggccgcagaaaataggaaaacagaaacttttttatcgattgccgggggcgccccgcgcctctatccggcgcggcggaaaccgggcacgccgccctcttacgcggcaagcccgcgcgttttacggcctccgctcgcaaaacgccacgcagcatgcggatataagagcggcacacggctggcttctctctttttgcaggatggctccagtcatgcgcagttctgcttaaagctgataaatggtatcggaaccaacacggtatatccgcaagcagaatctcacggcaaaagcacagaacagccgaccaattcaaattggactgcgctctttgctccaacaccctaatcttaaaccactttgcccgtaactgaaaccataactttagaacatttctaccagcaaggcggtggattccatatacaaaagaaatcgttaatcacttccaagtaaccgcccatattcccgtccacacatggaagaaaacacttcacacgctgcaaacatgtgggaaagaccgaatatctctgcggaaatagttgaacatttaaggaatcaatcgagcaaacaaaaaaagagtttgcaaatccaatctgcaaactctttctggctccccctgttggactcgaaccaacgaccctgcggttaacagccgcatgctcttgcaaaagatctacactattgatgaaacggatttccctctgtctatgcgaccagcatatcggggagaaaaattggatatgaatcgcgctaacaaagtgcgtactgtaatgaagggtctgaccaaagtggcaaaccaaaccggttgctctatcgttctggtggggtacttaaacaaatcccagaccgccaacagcgccctgcgaagcctgagctctgtggacttccgagcggcagcccagagcgtcctgcttataggctggctcaaatatgaccgggacgtttgggtgacggcccacgacaaatcttccccggcggatgaggacccctcctgtgactttacactggaaagcggcactctccactggcatgaggcgtgtaagtggagtgatataataaaaccgcacacctaagggaagaaaggatggacaggaaatgggacaaaaatacagtgcggaatacaaggccgatgtgctgaaactgtcggatgagatcggggtcagagcagcctgtgaacagctggggttatccaccaaaaccgtgtataactggcgtcgggaagagcggctgaagcacggcgaattacgcggcgtgcagccgggcgaaacagcggagcaggcggtcgagcgcctgcttcgtgagaacaaagaactgtacgaggcaaattacatactccgtaaagcgctgggttttatggcgggtcgataaccggtgtacgtccgcgggaactgtatgtatggatcaatgagcaccatgacggaatcagcatcgccctgagttgtcaggcgcttggcgtgcggcgggaagggtattacgaatggaagcatcggcccatgcggacagacctcgatgcacagttggtatcggccctgagaaaagcgaggaaggaacacccgtgttacggtgtgcgcgggctgcgggagactgtggagcctgcacttcgcgtgagctacggtaaatgttatcgtctctgcaaagaaaacgggctgttacaacgcaaaaaacgtccacacggcctgacaaagtgcaatcatcgtgacccacagagtgacgatttggtgcagcgggattttaccgccaggaagccaggcgtcaaatatttaagcgatatcacgcagatcaaatgtgcggacggcaggctgtacctggccgctgtgatggactgttatgatggggcggtcgtcggcttctccatgaagcatcatatgcgtgccagcctgtgctgcgatgccctgcacgatgcggtttcacgctatggttatcaaaagggtctgatactgcactccgaccacggcagccagtacaccagccaggaataccgggcggcgattgcggagttcggttccatccggcagagcatgggccgtacgcattgctgctttgacaacgcgcgcatggagagctttttcgcaacgctgaagaaggaactggtctaccggttcaattgctccaccatgaagcgggatgaggttcgcaagatcgtatttcgctggattgagacctactacaaccgccgccggcgcaacactgccaatgaactgaatctcccgccgctggtcaaacgggctcgcttcgctgatcgcccgtttgctgcttaaggttttactcatgggtgtacggttttcttgactattccaatgttcgaatgctgaaaagtcttgatattccggtgatttttgaaaaagagggaatcaatactgcggatatgaccagcgagatgattttaacctgtctgagttcctttgctcaggcagagagcgaatctatcagccttaatgtcgctcatggaaagcgaatgggatacaaacagggaaaattctccttccgatatactaattttttaggttaccgaaagggcacagatggacaacctgaaatagttccagaggaagccgatgcgatacggatgatgtttcaaaattatttaaatggagatagcctgagcaagattaaagaaacacttgaatctaaaggctctcctaccgctactgggaaaaaagaatggacaacgcaggctattctgcgcattcttcaaaatgagaaatacatgggtgatgtactgctgcaaaaaacatttaccgctaatttcttagaaggtaaaccgcagaaaaataatggggaattacctcaatattacatagaaaacaatcactctgctattgtcacaaaagaaatgttccatcaagttcaggaagaaattgcaagaagaaaaagcaaacgccccgtcactcagaaacattctaaaaccaaccggggaaaattcaccagtcaatatgcactatctgaacggttggtatgtggaaactgcggctgttattacctgcgggtgacttagaacatccatgggcgcaagcaaattgtatggcgctgtatcaaccgcttggaattcggaaagaaattctgcaaagactctcccagtattcctgaagatgcattgcacaaggctatagtggcagggcttaacgctctattaaatagccatcaagaagaagtcacctcttgtttacaaaacaccttggtaaattgcgcagtcacagaaacaggtgccgatcctatcgtcatacagaataaaatagctgaaatgaatcgggagtttgatcggctactcctccttgctgacgatgaagaaaacgagtttctggatagaaaactccaacagattaatgatgagcttctttcactgaaacaactaaaaaagcgtgcggaacaagctattgagcaaaacaaaaacagaacctccagggttcaggaaattatacagatgatttctgcggatgacataaccattcatgaatactccgataccctcacctatcgcattattgaacagattactgtcctatccaaagaagaagtcctgatccgatttgtaggtggatatgagatgacacagtcccttgtctaataaagcaggtacagagaaatgctggcagaccatgtgctgtcggtgtttctctgtgcctgcttttctcgttgagaaattggaagttttatagtcatttcgacaaatatttagaagagtgtatagataactactactcattttaaaatattcatcgccttgactttattcgtttttcagtataaaatgaaatagtggatgttgtcattttatatcgttatatcatattgaattttgtatggaggaataaacctgtggaatatatgtcaattgctgatgcttcaattaaatggggaatttcaaaaagacgtattcaggttctttgtgctcaaaatagaattcaaggggtaacacattttggaaaatcatgggcgatccctgcaaatgccaaaaagccatgtgatgctaggattaagagtggcaaatacattaaaacaatacatgcatcggaggaaaaatgatgattgcccctactcaaaaatggagaaaataccaaacagagtatggtatttgcataaatgaagattgtgaaaaggtaatccaaaaatatcttattcctaactttgaagggaaaattcaactaatccttacatctcccccttttccgcttaaacgtgcgaaaaagtatggaaataaagttggtaaagaatatttagactggctttgcggtataggaaatcagctagaaccacttctttcagaaaatggttcaattgtaattgaaattgggaatgcatggaatccaggagagccgactttttccacacttcctttagaaacattactatcgtttaaaaatgaatgtaatttgcacttatgtcaagaatttatatattataatccggcacgattacctggacctattgagtgggtgaataagcaacggatccgtgtcaaagactcatttacacaaatctggtggatgtccaaaactccatatccttacgctaacaacagaaatgtagctgaaccatatagcagacaaatgaaaaagctactagctagtggtaaatataattcaggaactcgaccctcagaacatattataagtgaaactgcattttctattgataatggtggtgccattccttctaatgtcattattgcagctaatacaacttcgaatgatatttacattaaaaaatgcaaagaacataacttgccaattcatccggcaagaatggcatcagctatacctgaattttttattaattttttgacgcaaccaggcgatattgtgctagattgttttgccggaagtaatacaaccggtatcatcgcagaaaaattgggtagaaaatggatttccatcgagcttgatcgtaattattatgagggatcaaaatatagatttgggagaaaatagtatggcacatattgacttccccaccgatttcccatcacttgaaacaatgatgtcggtattaaagaaagtttttgaaaaatcctggaaaattgatttagatattgaagatattaatatctggttagaaaactttaatggtaaattttttgatgtagaacaagaaaggcgtttagccttgtggctattatgcaattttacatattataatgacgcagaaataaaccatttgtgttccattctattcaaaaaatttgttcatgctttaatgaccgattatgaattaacatcttctgaagaagttgaggcttgcataggtacgctaaaattcacttctatcgggcgccccagtgaaagtggaggtctcattttatatcatttccgacaggaagcgcgacttagtacagattgctttgtatttcctacatccattgcggcaacaaaatctgacattattgtatgtatagatgatgttatcatgagtggaggaactgcacaacgttttttctacgataatgaagaacaatttaaaaacaagaaaatttattatttaacaattttaacaaccaataaagcgatttcaaaactcaatgatcttaatattcaggttatttcctgtgcagtcttggatgaacgaaatcgagctttttcagaagaatcgttatgcttttttaaatatcccgatctaaaagaacctgccaaaataatgtctgagggatacggaaaaataattgagcccaaaaaaccacttgggcatagagacgggcaatattgctttggattttcttataatattccaaacaacagtttacctattttttggtcatcatccaatggatggaagcccattttttaccgaaaggagaaatatcaaaatgccaaacaagctaaacgagagtatgatttcttcatttaaaaatcctttcgatgattataatgcaaatgtccttgatccggaattaattatgcagtattggtttacgcctttttctacaggagcattaaaagattttgatgaaaaacgtttttttactcaaaaaatgcctattattctgcaaggatctcgtggttcaggaaagaccacaatcttaaaatatttttcattccctgtacaatgtgaacgtgctagccaaaacaaaattactattaaacagcaactgctctcagataagggggtcggcttttattttcgatgtgatgactcatttttgaaagaattcaaaagtgtatttagcattgctgtaaaatcaaattggactgcctgttttgaacactacttggagctcttttttgtcaaaagcctaatcgaaatgatttgtaaactagccgaagattatggtagcaattttgcagatgaaatactgaaagtttctgctttaaacgaattaaggtcagactgtaatttcgataatatgcactcgttctcaagttatatttcttcagaaattcgttatataaacacttttaaaaatgaagctctttttacccaagcaaaatttgagccaaaacatgtgtggagtatctatgacataagtagtaaattgatacacgcaatttctttaacagcaccagaactatcaaatttaaattatttgctattaattgacgaatttgaaaatcttccaaatgaattgcaaaaacaatttaatactatgataaaattttgtcgtcaggatatttctatgcgtattgggaggagaagtgaaaatattgtaacgaaagaaacaattaatgatattgaatatttacgcgaattgcacgattaccatttaattgtgttagatcaagatcaagacatacaggacttacggtcatacttgcttggaatagctaaaaaacgtttggaatcaatagattcttctctgttgccatctaacatcatagatattttaggtgataaagaagatctggatgccgaatgtcaaaaggttgcaaatgaaaaaaatttgcatttatcgtatatcttgaattctaatccaagaataaaatctcaagctaatttattagatcagattattgaaataatctcttatccagaaaatcgaattgcagaaacaatcaatgcattatgggtttctcgttgtgaagaaaatgaagatcctcttgatgtagcaaaatttacggttagcgcgatgcacgcattcttcgacaaggcagaacatccattgtttgaaaagtacaaaaatgattacaacaataagtacagatatgctattgcaatattaatatgtaccgcctatcgcaaagacaaattatattatggattcaatacactttgtcatctttcagaaggaaatgctcgtacgtttattaatttgtgtaaagcaataataagcgatgcttttttctatgaaaagaaaaattttttagcaactaaaaggatttctgctgaatcacaatctcgcgcaataaaaaattattctcaaagtgagtttaattccgtctgttcaataattcaagatggtaatgcaattaggaagttcctattaagtttgggaaatgtgttttccgaatttcataaagaccggcttgttagataccctgaaacaaatcaatttatttataatccagatgatttatcaccaaaggacaaaaaaattctagatattgcaataagttggtctctaattaaacgtaagaaaaaaactcaacgtttatctgcgggtatttcgaaagaaggagatatatatacaataaataaaatatttgcaccaatttttaatatctcgtaccgtactcgaggtggaataaatgtagatttttcggctaaagaaattgaagagatgctaactggacaatttaaaaagaataagctcagtgcatccactagaaggaaaagagtaagtccgacaaagaatattaaagatattcctcctgtaaatcaattatcactttttgatcaaggaggaacacaatgagtatttgctatactattttttcagctttagaaattgatccgcattcctatgatacatttatcttagcagatggaacagatgagcgcacttgggaaatggcaaaaatcttaagtcaaaaaagtactactattagtactatagtcttactaaagtatcaacaagatatgtccaatcaggaaatagagagactatttccatctgcacaagtcttaccaatcatagccgatcagtcacaaacaattttcttgagtcgattactagatatttctgataaactgaagagcgataaaattcttatagatatttcctgtattcatactcctgaaatgtttgttttgctaaaatattttcaagcctccaatccaaaagaaaagattgatatcgcatattccactccatttgaatataattttccggaggaaccatttacgtcttattgctcatactatgggaatctcaaaaccactgatttgctaggctttggtggtatttctgatggtctggcacactctcaaatgatagtttttctaggatttgaaggtgtacttgcatctaaggttacagaagatatacaatataaagagctattgttagtaaacaatcttccatcttttttccctaaatataaagatatatgtgtaatcaataattatgacttgctttctacgcacagaagcaaactaatgtatgttcctgcaaataatccttttgaaacttttaattttttaaatagtctgttagatggagaatcttccgtgtgcatcgcacctttaagtactaaacctgttgctctcggcgtctgtttatatgctttaatgcataaatctatacgtgtagtttatcctatctcagagcagtacaactatgatagaacaaacaaagttttgcatacacacatttatagtatccctctaactaaagtggaagtttagcgtcaaaaaatgagtgaacagagatcggaattggaaactcaaaaatgaaatagccaaattctgccctctgtttctatgccgtaaattttatatttgcgttacttttgaacagttaatttttatggtataattgggatatcaaaaagtaaatatcagaaaatctcaacgtgaaaacgaaaacggactcgttctgaacccggaattttcattttttagtgggtatctttttcataacagtcacacaagcaaaaaccgcatggttaagccactttttagctttccatgcggttttctttttgtcttttttggggaaatcagggcaaaatcgccctatttttacttgcatgcaagtcacatgtcagtcagtcggaagcactcagcaagcgccgttttgcaggtattcgtcgagcttgtcaacgctctttttcttgtgcaccgcgtccaagtgcgtatatatcttgagcgtggtcgtcacgtcagcgtgccccatctgcgcgcaagcctgcaccacatctacaccggacaaataatgtattacgaacacagaccgagaccaaaaaagccgttgatcgtgattcacgatatcaacgaactgcccgtgatctgcaacacagcggaatcgggcttggctgctccgggtgtacccggaagcaatcgcacgcatgaaaaaaacggcgttttgccgggctttaagcaggggcaaagcgtggtttttccaccgtggcgatctcaaagcctacattgacaagctggtagagagggtgaagctgtgacctttgaggaactctatgcaaaagtgaaaaggtccacagcagatgatctcacaaacgagcgaatttacaatcttatcatcgacgaaaccgtgggaaacccgacaggacactcgctttgcgaattcgagctatatgcccgcgctaaggagctgaaagaagacgaatgaagtataataaggacagacaagtcaaagaaccaccttatctcgactaaatccaccacaattctataggaaaggagtttgaatcgacaaacagtgaacagatggaacaatctgcctgctatgccccgtgaggatgaagctaatccacacagggcgttttcataccaaagctaaaaatcaatgtatatcaagcggataaagcggcttctttctcttaaagaaaccgctttttgtttaggatgtcggggcttatgccgattacatgcactgaggaaggaacacaagatgaagatgactaaaaagacaatacgacttctgagcattccctttttgtgcagcttgagcgcatttcttcttttccgttttgtattgttccttggatatgcgccttcttctatggaacccattatacccacagacagttttattattggtatccgttcgtacgagaacctgtagcgaggagatatcgtggtgcttgaaaaagacggacagtatttggtaaaacgtattgcagccattccgggcgatatagtttgtctggatgatcacacactcggtatcagtcaattcagaaatagaaaatgctacccggatactagaggtgccggaatacagctatttaatgctgggtgacaatacttcggtatcgattggcgggaggtattggaagcctccttggacagcaaaagaaagtattgtcgctgtatgctaaaatcgaggccttactctttacataggttcacatcagctttcttctatatcgacggtattcctcttacaataaattttgcactgctggtttatcaatcatggtgctaaaaaacattggtcagccaattgcgtcaatagactatctacagtaatacttttgaagatctcaatcaggacagtgtttacatataaatacgctgtatcaagtatttgaaaatcatcttgttcataaagtccttcccttgatggcttctctacagggcattccattacagaaaagatattgcgcagcgagatttcgttaggaggacgcttcaacatatatcctgctggtccatatgcagctgatatcagatctgcattcctcaatcgggcaccaacctgaagaagatgccgcaaatttggatgaggacacagttatacatatttttgctagatacaaaataatgcgaaccgcataatctgtagatgtattaatctgcatatgcctatcctcttgctcatcaccctttatgataactatatttttcttcatttttgcctgcacccattttcaagcgtgctgcgtaatgcagacagatattaattttatataggttttccatcatataattttccagttcggatattttatattactttttataaagctccgggcgcctgtcactaaacacaggcatttctttacggatctgcgtaagtgtctgtagattgcattctgccaacagtatagtttcctcttctccggcgcaagaaagcgttattcccaacggattaatcacagcggaattacctccataaatcgtttcgtctgccttgccacaggaattacagcatacaacaaacatctgattttcgattgctctcgccgttgtcagcgtccgtaaatggaagattctcttctttggccattgggatactacaaagagcatatcaagtccctgcagtgcaagttttcggatcaactcaggaaaacgtaaatcataacaaatgataataccacaccttatttcgtccagaataaaactgcaaatctggtcgccgtatgtaaaatatttgtcttctctcatgggagtgaataggtgtgtcttatcatagcttgcaatgcaatccccatcacggttgaaaataaaagaggtattatatacttttccatcgtgcatattaggaaccgatccagcaacaatatttacttggtattgccttgccaatccaccgatatatgactttaccctatttccatctttacagcaaagctccgcaagattctcttttggaaagaatcctgtattccatgtttccggcagaacaaggacatctggtttttctttcattgccctacagatcagatcctccgcatgagaaaaattttcatccgtacatccgaacttcatatccatttgcaggcaagctaccttcatggcgttattccctctttcaaaagtcggcacaagcgattggctgcttccttagtttcttcaggacctccaaaagtagagaaccggaaataaccctttccgcatcctccgaatccttcaccagggacaccaaccacttgaatttcatggagtaagtagtcaaagaactcccatccgctcataccatcgggacacttcatccaaatataaggagaattttttccgccgcaataccaaattccggcagcatccagtgctttcataaaacaagaagcgtttcctttatacacatgaagattctcgcgaatctgtcgctgtccctccggcgtaaataccgctaaagctcctttctgaaggatataggaaattccgtttgtccgtgtttcacgattacgagaccacatttcatttaagttcatgccctctcgaataagattatgcggaactacggtatatccaagacgtgtgcctgtaaaaccggcagtttttgaaagcgaacatatttcgatggcgcatcggtcggctccatctagctcgtagatgctgtgtggtacatcttcttcctcaataaagatctcatatgcagcatcaaacaggataaccgctccgatctcattagcaaaatcgacccatgcctgcaaccctctacgactgtatacagcgccagtagggttattaggagaacaaatataaagaatatctgcttccgcctttttactcggttcaggtaaaaagccgttttctttacctgaagccaaatggatgatttttctgcccgcaaggatattcgtgtccacatattcagggtatgctggttcaataaccattaccgtgttatcccgatcaaatagttccaaaatatcgcccagatcatcacaggcaccactggatacaaaaatctcattttctgtaatacacacccccatctggtggtagtatccctcaattgcatggcggagatccgccgatccgatttcaggcatataaccgtgaaaagttgcggcattcgcctgatcgtcaactgctttgtgaagcgcttctatgaccgcagtacacagcggaagagacacatcgccaacacccatgcgcaatactgtttttccggggttagcatccaaatactctttcgtcttacgataaatggtattgaataaataagtgtccttcagcttactgtatcttgtattgggttttaacatatctccgtctccccttcatatactgtttcggcaggtcctgtcatctgaaccgtattatcaggatttattttcactttcaaggtaccgccatcaagctcaaaccacaccgtctcatcataatggctattgtgcgtatataccaccgccattacagaagtgcaggcgccagttccgcataccagcgtaacgccgcttcctcgctcccatacgcgcatacacaatttgttttcggatattatttctacaaattctacatttacgccgtctggaaaggcttcatgacgctcaatcctcgggccgatcacaataagcggtgctgttttgatatcatccacaaaaatgactgcatgtgggttgcccattgacaccggaataagcgatatgaaaattccatccacagtgagtgtcagcgattttccccttctgcttttcccatatcgacagttacatttttaacctcgcctccagcagcctgaagcgtcagatattttattcctgacaccgtttctatgctgagagactttttatctgtataccccttatcatatacatattttccaacacagcggattccgttcccgcacattttcgcttcacttccatctgcattgaagatccgcattttaaaatcggcagcagtcgattttgaaatgtaaatcattccgtccgctcctgctccgaagtgacgctcagacagctttctggatagttctgaaatatttgcaggagcttcgccataaacatacaaatagtcattgccgagtccctgcatttttgtaaatttcatttctgacacctcatttttcatcgattgcagagatacagattgtgacctcctccagcacattcagaatcatccgcaccgtatctagagaagtcagcatggtagcctgataggtataaaaaaggtcggacagcatctcctgataaccggccatagaagtattgaatacaatttcaagcacacggttagaatctgcgccaaaactgaaatttcctttctctcgagtcttttctggttcgcttatctcattttttaacatccgataatcgcatttcaaaccgatcctttctggtatcagtgggaatctttgtcggatagttgccgttaaagcaagcgctgcagaagctacgaccgcctgtaagatattttaatttatctattggaaaataacccagcgaatcagctccaataatatcacggatttcagaaacgctgtgtttgcaggcaatcaaatactcctcggaatcaacgtccgttccgtagtaacaggggtgcagaaacggcggcgaggagatccgaacatgaacctcttttgcgccggcatcgcgcagcagctttacaacacatcccatggtattgccccgcacgatggaatcgtcgatcaagactacccgtttatcttttacacttccctcgacagcagcgagtttaattttaacgctgtccaatcttgcttcctgtcctgatgagataaatgttcttccgatatacttgttctttatcagcccgattccgtaaggtatgccggattcttcactgaacccaagagccgcgtcaaggcctgagtcaggagcaccaatgacaatatccgcttctacaggatgcgtcttggcaagaatttttcctgctgttatccgggatgcatggaccgaaacactgtctataatagaatccggtcgggcaaaatatatgtattcaaaaacgcagagctttttatcctttgcgccgcagtgttcacgtctggagcatatgccgtttttgctgaacaccaatatttcaccaggttctacatctcgtatgacctcggctccaacggctttaacagcacagctttcggatgcaattacatacattccgtcagccgttttaccatagcacaaaggtcggaagccatacggatctctggcacagatcagcttttgcggcgacatcagaaccagagagtatgcaccgtccagagtattcatcgcacggcttacagcctcctcgattgatgcggattgaagcctctcttttgtaataatataagcaatcgtttcggtgtcgcttgtagtatggaaaatggctccggaaagttccagcccatttcgcaattcagctgcattgctgagattaccattatgtgccaaagccattcggcctttctgatgattaacctcaataggctggcagttgttccgattggttccgccggttgtaccgtagcgggtatgagcaaccgccatcgaacttttcggcatacgggacaaaatatccgatgagaagacttcgcttacaagtcccacatccttataagaaacaaacacgccgtcgtcatttacaacaataccacagctctcctgccctctgtgctgcaaggcatacagcccatagtaggaaatgcccgccacgttacagggttcaggtgtcataacgccaaacaccccgcactcttcatgtatctctgattccagactcctcatagtttccttcctcctgccgtctcgagagatgccttaatgaaacccttaaataaaggatgtgctttggtcggtcggcttttaaattccggatgatactgaactccaatatggaacggcctttcggtaagctctaccgtttccaccagccttccatcgggagacgtaccgctgagcgtcagtccgtttttttcgaaagcttcccggtaatcgttattaaattcatagcgatgcctgtgccgttcgctgatgctcagcgtaccatagcagcgctccattgccgtgcctgatttgatactgcagggataggctccaagccggagcgttcctcccttatcaatatcatcgctttgccccggcataaagtcgatcactttatgtttacacaattcatcaaattctccggagtttgcatcatatattccgactacatttctcgcatattcaatgacagcgatctgcatgccaaggcaaataccgaagtacggaattttatgttctcttgcgtattttgctgcaagaatcattccgtcaattccacggccgccaaatcctccgggaataagaataccgtcaagatttgcaagcgcttcttcaacattcttctctgtgacctcttccgaatcaatccaatgaatatggatatgggtattatgataatatccggcgtgacgaagcgcctctgctaccgaaagataggcatcgtgaagactgacatatttccccaccaaaccgatgtctacatggtgtgtccttgctttaatgcgttccaccatagctttccattcattaaggttggattctggagcatcaatgccgagttcacggcatacaacggaagaaaaatttgatttttccagcataagcggcgcttcgtaaagatttgatagggtgatattctcgattacacagtctgtcttcacgttgcagaacaacgatatttttttgaaaatcgactcttccagcggctcatcacagcgaagtacaatgatattcggagcaacgcccatcccctgcaactcttttacagagtgctgcgttggcttggatttgtgttcgtccgatccactgagaaagggaaccaatgtcacatggatgaaaaggctgttctccttccctgcttcaagagaaatttgacggatagcctcaataaacggctgggattcaatatcgccgatagtgccgccaatttcaacgatgaccacgtctgcccctgtttttacgcttacactgtacacaaattctttgatttcatttgtgatatgcggaataacctgcaccgttgaaccaagatattcgccgcggcgttccttattcaatacattccagtaaaccttacctgtggtgagattggaatatttattaagatcctcatcgataaaacgctcataatgtccgagatccagatcggtttcagcgccatcctccgtcacatatacttcgccgtgctgatatgggctcatggtgccgggatctacgttgatgtatggatccagcttttgcgcggcaactttcaggccgcgcgcttttaacagtcttcctaaagaggcggcagtgatccccttgccaagaccggatacaacgcctccagtcacaaatatatattttgtcacaattcttgctccttcattcgaattcatcaaaagcacttgcatgcaaacgcctttatatgtctgttgttatcctgatgcagtatcaagctgttttattccttcataatccttctacatcctttcatgatacgattttttcggttctgcaaatcttgcactataacccgacagcaataattaattttaaggcattgtcacttcgctttttcttttatttcccgctgtctccatagttggaaagcaccctagcggatgggtcgttcacatcgcagccttcccacgacttattgggcatccagaaatccgcaatcatcccagcttgtcccggataatgcttttcaaaaatgtcgcgataaagcaaagattctttagtaaacggacgggcatggccgtattttttgcagcctgcttgaaattcctcatcggaatactgctgcccagcgtactccttcagataatccaccattgaatgccctaccgcatcagaaaacgctgccttttcacgccacaatatttcatccggaagatatccgcagccttcgaaagcatgcctaagaaggtatttcccttttccaaatttgttgagtttcatttccggatccagggccatcatatatttaacaaaatccaaatcgccaaagggaacccgtgcttccagagagtttacggaaatacaccgatcggcacgaagcacatcgtacatatgtatctcgtggatacgtttctgcgcttctttttgaaacgcttccgccgacggtgcgaaatcggtgtatttatacccgaagagctcgtcggaaatttcaccggtaagaagtacacgaatatccgtctgttcatggatcgccttgcaaatcagatacattcccatactggcccgaatggtggtaatatcatacgttccgagaagatagatcagcttatccaatgttgcaatcacttcatcaggcgtcataaaaatttctctgtgatcactgccaatatatcgggcaacctgtcttgcatatttcaagtcgatagcatcctcactcataccaatcgcaaaagttttgatcggcgctttgatcttttttgcagctatagcgcatacaagtgatgaatccagtcctccggaaagtagaaaaccaatttttgcatctgccacaagacgtttttctacgccagcaatcagtttttcacgaatatgcttacaggcggtttcaagatcgtcatggcatactttatcgactttagcgatatcggagtagcagataaattttccgcccttatagtaatgcccgggaggaaacggcatgatcctatcagccagccccacaaggtttttggcttcgctggcaaagagaatgacgccccgatagtcatagccataatataaaggacgaataccgattgggtcccgcgcagcaatatattccccagcttggccgtcgtaaataatgcagacaaactcagcatccagcattgagaacatgtctatgccgtattcgcggtataaaggaagtataatttcacagtcgctgtcgctcttgaatgtgtatcctttttgcataagctgttgtttttgcgtttcaaatccataaagctctccgttgcagacaacatagcttccatccatctcaaacggctgcatgccggaaggcgttaaccccataatggaaagacgatgaaacccgaggaaccctttccctgtatcaataatacggctgtcgtccggaccacgtgaaatagtgcggtcaaatccttttttaaacgccttaaaaacagcaccgctgccacagtaccccataatagaacacatagaaattacctccgtgaataaaagtaaattcagcattcctcagggcgattgctgtactcgcggtgccacctgattttttctcatttctgaacctctaacaaggctctgtcatctgacgtgcgacggtacggcgcacctactaagattctctcttttcagattgcagctcgaaaagtgttattcatgcaggctcgccatacgtcttccaccatcccgtactcgctgttggtgagtctactgcattacttctcttttctcaaacgcttttgacatatcctatttcttatctacaggttttcatatttactccacatcctgcaaggcatcatacccttcttcaccggtacgaacctttacgacattttcaacatcataaacaaatatctttccatcgccgatatgtcccgtgtaaagaacccttttcgctttgtcaatcacactgcggacaggtactttgctgaccacaatatcaacctgtatttttggcagcagattggcttctacctgaacgccgcgatagtattccggtttaccctgctgcataccgtaacccagaacatgcgatacggtcataccggtaataccgatagaggtcatggcctgttttaaggtctcaaagcgattctctttacagatgatctcgatcttggtaaatttcggtaagccgttgtcaaaggtcggaaccttttggactggtatagcctccgccaccggaatatctccgctgacggcagccgcatcctcataaccgtaatccagactttctacagccggggcaaagtctgcatatgcgttcggcagaccatgttccgtgctgtcgaggcctttcatttcttcttctggagaaacacgaagcccaaccgttttcttgatgatcaggaaagcaatcgtcatcgtcacaccggtccaagccagaacggccgcgataccaagcaactggatgccaaacagcttcgggcttccagtataaaacaaaccgtttaatccagcaggggcctgcgggctggctaacaaaccaaccgcaagcgtgccccacacaccgtttgcaagatggacgccgaccgcgccgaccggatcatcgacatgtaatttcaaatcgaggaattcaacagcagctactacaagaataccagacacgatgccaactacaatagagccgatggcatctaatgcatcacatccggcggtgataccgacaagtcctgcaagtgcagcgttcaggcacgactgttccgatacagaagtccatcagttttttcataatgatgtttccggcgtttttagctcttgtaaatccggtttccaccattgcaaagccagcctgcataaagaatacaaatgcggtcccaatcaaaaaccaaacgccaaaaacctctgaggttactgtttcctgtacaagcttagcaaattcttctatgaccatgccacgcccccctattaatcatcttcatagctatcgaacattaaatagcaaatctgcatagcttgggaagggccaataagtctttgctgttaaggtttccgcttcatcacaggccagtctaagctcacacataagattaagcactgtatctcggatcataacggattccgtttcaatatcttcagcactatccagagacagaagcgcgctttccagctcctctgttttttctgcgatcccgtccgtcagcgcggaaagacgtcttacaacgccagtctcatagctgcatgcgagggtagaatcaaagactttctttgccgcagctgctttggcaacatcagcgctgtatgcttcaatcgccggcgcaatctgtgtttttgccatatctaccatcgtattagcttcaataacgatggtcttgcaatagttctccaacatgatttcacatctggatttcagctctgcctccgtgtagacgccgtgggaagtaagcatctccacattcttcttatcgagcagatgcggcatacaatctgccgtagtacggtaattgagaagccctcgcttttcggtcgcttccttgatccagctttcatcatagccgtttccattgaaaataatatgcttatgatccctgatcgtctttcggatcatttcatgaagtgtgctttcaaaatccgttacaccctccaagcgatccgcataaaccttgagagactccgcgacagcgctgttgagcatgatgtttgcgcaggctatgctgttggacgagccaagcatgcggaactcaaacttgttgccagtaaaagcaaaaggagaagttctgttgcggtctgtcgtatcacggttaaacttcggcagaacatcaacgccaagcttcatctgcgttttttcaacgcccttatatgggatatcggtttcaatggcttccaaaactgcactcaactcatcaccgagaaagatggatataacagcgggcggcgcttcgtttgcgccaagacgatggtcatttcctgctgttgcaaccgaaagacgaagaagatcctgatagtcgtccaccgccttaataaccgcacacaggaataacagaaactgtgcgttttcataaggtgtagctccgggagaaagcaggttctgtccttcatcggtagcaatagaccagttgttatgtttgccgctgccgttaacgccggcaaaaggcttttcatggagcaagcagacaagaccatgtttttcggctaccttctgcataatttccatggtaagttggttatggtcggttgcaatattcgtggttgtatagacaggtgcaagctcatgctgagcaggagccacctcattatgttctgtctttgccaaaattcctaactgccagagttcatcgttgagttcctccatataagcagctactcgaggcttgattacaccaaaataatgatcgtccatttcctgccctttaggcggctttgcaccaaacaaggtgcggcctgtaaaacgcagatccggacgtgcgtcatacatttcttttgtaatgagaaaatattcctgctccggccctacagaggaaacaacccgctttgccgtattgtttccaaacaagcggaggatacgaagtgcctgtttgttaagagcctccatggatctgagaagaggtgtctttttatccaatgcatgtcctgcataggagcagaaggcggtcggaatacacagtgttttccccttgataaaagcataggaagttgggtcccaagcggtataccctctggcttcaaaggttgcgcgcagcccgccggatgggaaagaagatgcatccggttcccctttaataagttcctttccggaaaattccataattacaccaccgtccggggaaggtgtaatgaaactgtcatgcttttcagcagtaatacctgtgagcggctggaaccaatgcgtaaaatgcgttgctcctttttcaacggcccagtttttcattgcctctgcaactgcattggcaacgctgacatccaattccgttccttcatcaatggtctttcgaagtgatgcataaacctttgctggaagatttgcccgcatcatacgatcatcgaaaaccttgcttccgaaataatctgatactgtactcatatttctgtctcccttcaattaaataaaaacaaataaaggcaaaggctcttttcattcatttgaacacataaagacgcctttgccttttttatttaattttcccagcttttttcctacagcaaggaaaagagcgtcttcaagttcaatcactcaaagacgcccttgcctttacgttttgcattatactacggcttccacgtattgtcaacctaaaaatgcaagtttttttagaaagcctgcatttgcaccgttattaatccgattcccattgacgaaccgttgacaaattgcatgtttaatgctatacttcttgcaatgggcaaaggtgttcattattacacaggatatccggtgtggtaatgagtacctttttatttattttctgaaaaggattggtaattatggtgaaagaaggtcaagtacgaattccatccggatgtgctattgctgctgttatatcaaaagaaggcaagaaaatgtccggccagatgatttataacgcgatgaaaccgatgcatgaccgttctaacgggcttggcggcggctttgccggatacggtatatatcctgaatacaaagatttttacgcattgcatatgttttttgactgtcgtgcaacacgcaaagcgtgtgaagcatttttaaaagagcgctttgagattgttaaaagtgaaatcattcccacacgtaccattccggctattacagatgcgccgatcatatggaggtactttgttgctcctttgagatctcaactcacttccatgcagcttgatgaaaaggagtttgtcgccaaaaccgtaataaagatcaactcggagatgaacggcgcttatgctttttccagtggtaaaaatatggggacattcaaggccgtcggctttcctgaagatgtgggcgtattttataaattagaggaatatgaaggctactcttggacggcgcatgggcgctatccgaccaacactcccggctggtggggcggcgctcatccttttacactacttgattggtctattgtccataacggtgaaatttcttcctatgacgctaaccggcgctttatcgaaatgttcggatataaatgtacgctacagactgatacggaggttatcacctatattgtggattaccttatccgtatccaaggtctcactctgggtgaaacggcaagcgtcattgcggcaccgttttggaataccattgccaataaaaccgatcaggaagataaagaaaaacacattttcctgcgaacggtatttccgagcctgctcattaccggaccattttctattgttctcggttttaacggagggctcatggcactgaatgaccgtttgaaactccgttctatggtagtcggtgaaaaggacgataaggtttatattgccagtgaagaagctgccatccgaactatggagccagaggccgaaactatttgggctcctgctggcggcgaaccggtaatcgttaatgtaaaggacggtgcattttaatggggatggaatttatctatccggaatttgaagtaatcagaaatactgatcgctgtattgtctgccatgtatgcgagcggcaatgcgcaaacgaggtccattcctttaatgcggaaaaaggcgtgatgacagctgatgagtccaaatgtgttaactgccagcgctgtgtatctctctgtccaacaagagccctgaaaattgtaaagagcgattgctctcttcgggagaacgccaactggcaaagtgatactgttaaggaaatttataaacaagcaaacagcggcggcgtacttctatcttctatgggcaatccaaagccgctgccagtatattggaataggattctaatcaatgcttcccaagtcaccaatccgccgatcgacccccttcgtgaaccgatggaaacccgcgtatttctcggtaaaagacctgagaaaattgaacgagagaaaaatggtaagcttagctgcaaattatctccgcagctcgaactttccatgccggttatgttctctgctatgagctatggttcgattagttataacgcccatgcttcgctcgcccgcgcagcaacagagcttggcattctttataataccggagaaggtggtttacatgaagatttctatgtatacggtgaaaacactattgttcaggtggcttccggccgctttggtgtgtacgaagattatctaaaagccggtgcagccattgaaatcaaaatgggacaaggtgccaagcccgggattggcgggcatttgcccggcacaaaaattgtaggcgacgtttctcgtacgcgtatgattcccgaaggctcagatgccatttctccagctccgcaccatgatatttattctatcgaagatctacgtcagcttgttttttctctgaaagaggccaccgaatataagaaaccggtaatcgtaaaggtcgctgccgtacataatattgcggctattgccagcggtattgctaggagtggagcagatatcattgcaatcgatggatttcgcggcggtacaggcgcggcacctactcgaatccgtgataatgtcggtattccgattgaacttgccttggctgctgtggatcaaaggctccgcgaagaaggaatccgaaacaatgtgtctcttgtggctggcggcagtattcgcagcgcagcagatgtcgtaaaggccattgctctcggtgcggatgcctgctacattgcaacagcggcacttctggctcttggctgccatctatgccgtacctgtcagagtggtaaatgtaactggggtattgcgacacagcgttccgatcttgtaaaacgtctcaaccccgatattggcagcgaacggcttgtcaatctaatgaccgcctggcggcatgaaatcaaggaacttatgggcggtatgggtataaattccattgaagcgctgaaaggcaatcgactaatgctgcgcggcgttggacttacagacagagagcttaaaatcctcggtatttcacatgcgggagagtgataaaaataaagcccgtatatgtaaatgaagaatggtgcctcgggtgccatttgtgcgaatataactgtgcttttgccaattcaggaaaatcagatatggtatccgcactgaaaggcaagcccacttatccccgcattcctattgaggaaaatgatatgaaaagtttttcagtcgctgccgcattttctcccgaaaaatgcagaaaaaaatttggaggtgtggtataatattatggtaataaatgcgaaaaaccttgattacagaacattaaatgagaatctccgtaaagctcaggaaacctgcttcattacggaatgctgcgggcagcgtttcatcgccgccggtatgtccgacaagaaaatcagcattgaaggtgttcccggaaatgcgttaggtgcatatctcaacggcgctgccattactgtctatgcaaacgctcaggacgccgtgggtgataccatgaacgaaggagagatcattattcatggcaatatcggcgatgcggcaggttatgccatgcgcggcggaaaaatttgggtcaagggaaatgcgggatacagagccggcattcatatgaaagcctatcaagacaaacttcctgttatggtgattggaggaaccgccggcagctttctcggcgaatatcaggcgggcggtataattgtagttctcggtcttgaggtagagacggatagaattgtaggtttcttcccatgcactgggatgcacggcggcaagatatttctcaggagtgactgcaaaaatattgagtttccgagtcaggtcacagcccgccttgctaataaatccgatatggaagacttgaaaatatacgtttccgaattctgcgatatgttcggctatgatatggaagatgttctgtcttcagcctttaccgttgttacccccgatagcaaaaatccgtataagcaaatgtacgtagcaaattaaaagaaagcaggtgtaatatcattatgaagtactcaaaagatgaagttatgcaatatgtccaggaagatgatgtgaagttcattcgtcttgctttctgtgatgtatttggcaagcaaaaaaacatatcgatcatgccggaggagcttccccgtgcctttgaatatggaattgccttcgatgcttctgctattgctggttttggagatgaatcaagaagtgatctcttgctttatccagatcccgaaacattgatgctccttccctggaggccggagcatggtaaggttgttcgcatgttttccaacattacataccctaatggaactccatttgaatgtgacacccgaactctgctaaagaaggccataactgaagcaacagaagctggttttacttttgctttcggcgcagagcaagaattttacctattcaatctggatgaaaacgggagaccgactgatattccttatgatgaggcgggttatatggatattgcgccagaggatcgtggtgaaaatattcgccgtgaaatttgtcttactttagaacaaatgggtattcgtcccgagagatcacatcacgaagaaggccccggccagaatgagattgattttcgttattccgacgctttgaccgctgctgataatgccatgacatttcagactgtggtaaagactatagcaaataaaaatggactttgggcagacttttctgcgaagcccttggcagattggcccggcaatggtttccatatcaatatgtctgtaaaacccaacgaaacatccgaaaatctttgctatatgattgcgggaatccttgacaagatatcggaaatgacggtatttctaaatcccaccgaaaattcatataagcgttttggacaaaaaaaggctcctggatatatctcctggtccagtgaaaaccgttctcagcttgtccgcatccccggcgcagttggagcataccgccgcgcagaattacgttcacccgacacgactgcaaatccgtatttggcattttctcttatgatctatgctggtttgtacgggcttcgtcataaaattaatcttcctcaagcgacaaatattaacctatttgcagcgaacaatgaaactctggccaaattcaagaagctgcctgaagatttaagcgcagcttgtaaaattgcagcagatagtgcgttcattagatcttatattccccgcgcaatactggatatttattgcaataaataaagtgtgagtacaggtccgacaaggagggcaagaatgggtttgaaagaacaagtctatagtgttctgatcgtttcggcatcagaacgatttaatatcactctttccactttgctcccaccttcgagatatcaaccagtttgtaatgttgccaatatcagttccgcgaaaagagccgccgcagaacgggaatttgattttgtgatcatcaactccccgcttcctgacaatcccggtattcgattcgccattgataccagtaatgaacgtgaatccgtagttttgctgttggttcgggcagagttgagtgaagaaatatactatgagacggctgagcacggggtattcgtcctttcaaaacctacttcaaaagcaatgataggaattgcactcaactggctatccagtgccagagaaaggttgcggaaaaacaggaaaaacgcattcactttacaagagaaaatggctgagatccgtatagttaatcgggcaaaatggctgctgatcgaagaattgaagatgaaagaaccggaagctcatcgatacatagaaaagctagcaatggatcgctgtgtttccaaaagagttgttgctgaggagattatcaaaacgtattcataaggggaaaatcaggaagattgttatgaaacgaatagtcaattttatccttgcaatgacaataaactataatagcaaaaaacaccgcggatgattatataaatttagtgccaagtgataaaatttaaatttcttcaaccagcagccaaacatacaatttattatcaaagtctcaactataatattgggaaaattacaagaaaatgaatagaggtcgaaatttggaactcaaaaatgagacaattcaaatttcagtctctgtttcatgtcataaattcagcatttaagccgctttttcaggatcatccccttttacaaaaacgggacacccagaagtaaagctctaaaaatcactgtgcaaaaatgaaaatgaatccattctaaacccggaattctcatacaaatgagaattccttctttaattatcccagttttatatggatatggtaacacaagcaagcatccatataattcctgccaatattcttgaaacagaaaaaggcaccttacaagccggcgttcgtcgagaactgcaaaaaagggcggcaaacaacgaacatattgatgccgtcgacctaacaaaaagcttcataaaagttttcaaatgattttaaaaagatatctggagatcacaagaagaaataagcactgcatcgaattatcttttacagtttgtccctctaacacctccagactgctataattgtgcaataatcgctaacgatcatacgtattttccaatcggacggaccctcgaaaattacacaagaaaatcacaatgcatttcatcttatctggattagaaaaacagaggtcgaagttgggatctgaaaatgagcccccaaaaattcaacctctgttttcatgttatgaatcctgccttaaaccatggtataagatccatcctcttttactggagctggatcttaaaggaaacaaactcaaaatggctttgcaagaataaacctactgttttaaactgcgccatacaagatgcaaaggaatcaatccctcagtctttgccttccaacagacgtaaaagatctaaagcaattcaggctacttctaactgctgtttcatggcttgctcgagttccaacatcttttccgatttcgcgagagaacctaataaaaattgcaaatcatcttttggtatggtcgtaagctgctccgttaaagcagtgcttttcttccacagtccgtacccagaaatctctacatggaatgacataggcggcttaacagaagacgtcatcggtactactgtaaccacaccagagcgtcgattgtttcgatcgttactgacaatgattaccgggtgcgcaccttgcaatacatctcccttccctgaaatcaaatttgccatccaaatatcgccccgtcgtacacaatccttgttcacaaagtttcccccaatccgattttttgataatattgtttataagcccgctgctttaattcctgcagtgccattaactgctcctccacatgagtattcactctgcgaagctcttctgcatactggatttgctgtgcaagcggtatataataaatcggcaaatgctccaaatctaccgcccgaatcattggaatactactccccatctgaatctgctggatagctctttggccggcaggactttgcaaataatagaagagataccatcgatcgatcttggtgtcatccgtacgaattcctaaaaagtcatgggaaagaattaccggcatatcttttgaaacaacacatagtttgaccgcttttcccttacaggaaatcaagatatctcctgtcttaatttcataacgctcgagattctcgcgtttagaaagatcatagcggattattttatccatgcaaatctggctgttttggacatcggagagtcgcagcacttcagtcccctccgaataaagagaaaacccggcgacattaattcctctgtatatcttagccacgtcttgcaagggtacagttctgctgggcaagtctatagcagctttctgttctgaagtataagaatatacttgtcgaccactgtcctgtcttcgaaggtgatacgaatacttttgaggtgacagattaaatgcatccaactcggaaggatagaccgaaaagcccttttcctgcatgataggtaaaatgctttttctcgagttgtaatttatactgtcaagtccatttttctgttctggttgtccagacagaggaagttccaccatctgaacaacgtcgtccctttttcgccccttgcgaaaaacaatcaacgaagttgcaggcatcgcagaaaaagaaaacgcattcttaggcaaagcaataatggtatctattacattcagctccaataaatatttcctgaaatctatattctttgcattaaacaatgctccattgggaattcgacaaacgccaacgccggtttcacttaacatctccagttggtgaaaagcgtaggaccaatcgctgccgcagactatggtatccgtaacctgaatcggctctccgccacgtaagggtggaaacataatagacatattcgcttttcccttcgctaacagctgagaaccctgtatacaatcttcgttagcttgtcggaattctaatccgtgcatttgggatctcaaaattgacagatgaaacaacagcgggtctatttctttggtaaagacttgaatatcacactctttttcctgtccgtactttgcaagcctgatcgctacaccgcctgcacctgctgttccatcgtaaaatatcccgtctgctataggtaagaggtctacagcgaagcgctccaaccaagccggaaccatcaagtccgctcgataatatctaataagatttggatagatcaatcgctcgacaagacgacgcagcttatttttatctttgctaaactgtgcccagtaaaggaaaagttgctgaaacgtatcttccaacaaacgtacctgagaaaactctcgaaaggatgctgctgtctttggctttgttttccgcagatattcatcaacaatattttcaaagtctttttgcaaaataacaccactctgcaaactccgaatggcaccttcgtccaaaaaataaaatccaatgcaaagagatatagattggatcaacaggtcaaccatggaacaatctttaccacgggtttgattaagtatctcccgaatggggtctgtatgaacagatgacatatgcctgaacctcaatttcacaaataattgtattactctctgttattaatatagcgtaccctttcagaaaagtcaagagtaatttgattattcgaaaatattttttagccaacacaagccatgccgcggtggatcctagagttcgccgttcggactgccgctcctcctgcgcaaaaaatcacgctgtgcctgcgctgttcgcttgtaaacgcgcgctcagcgcttcggcttgctgtgggcgttttgcgggttggtgccgcggtccctttctggcgttctttttgcagcgtaacgcccataccgagagcctcggcacgcaatccgcgtgcggggcttttttctttgcccatggtttcgcgcttgcgcttatagccgggagtttatatctctgttcaaacccacggcgccttctatttttccgcaaaacgcggacagcaccccatgcccgccgctttcctgctgcggggctggggtgctgtgctgtgcttttattcggctgccgcgcggatgcgccggaggatttcctcatccgccgggcagaaatcgtactgcgggatctccgccggcgtgatccagcggatgtcgttgtgctcgagctttttcggcgtgccggcgcggatgaacgcgctgaacagcgtcaggtgcacaagcaggtcgggataatcgtgcgtgacctccataaacaccgcgccgggggcgacctcgacgtccagctcctcgcggcattcgcgcacgagcgccgcgggcttcgtctcgcccggctccaccttgccgccgacgaactcccacaaaaggccgcgggccttgtgcgcggggcgctggcagatcatgaaccgcccgccgtcccagatcagcgcggcgaccacctcagtctgctttttcatcgcgcgcctcccgcggcagcagcatttcccagtcgagtgtcgcagcgccgtcctccaaaaccgtatacgggacgccgatacgtccctcggcgcgcacggcggcaaacgccgggtcaccgtcgcgcaggcgcagaaaatccttcagattctgcaaatcctccgtgatgctcagaaatgtgtaggggacgccggcctgatccagcgccgcgcagaacgcgacgcagtccttgcacagcatcgtgccgtaaattttcatcgtaatcccactcttttcagtcgtagtaattcggcaccggggcctccggataggctccctgcatattcggcgcatacggccatttcccggtgtcttcggcgaggaatccgcagatcagccccatatggcgctatcagtgccggaactgaccaaggatcaggcagaacgctcagcggcggacggattccttatacaccatgctggcggttttgtaggacaccgcaaaggccggctcgccgaaatcgatcgggtacggctccgcttcgatttcacccgcgagcagcttctcacagagcgcgagcatgtcctcgagcttttcgtagctgttcggcacatacggctcgccggggtgcacgccgccctcctgccggcggtggccgccgagaaacgcaagctcgtcgtacccgggctgcgcgagcttttccctgagccgcagcaggttttcccgataggcgctgaccggcagggccatcggcacctgcatccacaggccgagcgcgtcgccggtaaagaggcacttgtgcgtgcggtcgatgaacacgaccgagccgggtgtgtggccgccgagctcaaacacctcgatctccacgccgccgagatcgatcacgtcgccctcacgtatgtccacaacctgctccggcgcggaggtgttctccgggaacgaatcctgtacgcgcggcagcagcggcagatcctttttcgacatgtagaaccgctcgaagcggtagctgtggcgcatatggtcgaggtgcgcatgcgtgacggcgagctccacaggctgcgcggtcagcgtctttgcaaacgccagcgggtcgccgctgccgagaccggtgtcgatcagaagcgccttttcccggccctcgacgaggtacatcgagtcgtcgttgaagtcctcgatgtagaacacgccggggcagatcagctccgcctcatagcggccgcggcgcgacttctcgaacagccacgcgagtgcccgcccgtcgcggtaggccgctgcccaagaagcatgcgggtgcacgccccagtccttttccatgcagcccgcggggtattcggtgtagtgcacatcgcggttgccggcggagcgcaggctcgaaaccgccatgcgcgtgccgacgccgacggcgccgtgcggcgaatggtattcgccggtcaccggcacgaccgggtcgtcggccgcgtggaaggcccaaaccggcacatggcgcgccgcgcgcaccgcaaacggcgccgcatagccgcagaccggcatggcggcggcgattttctgcgggcaggccgtgagcagcgcccatgtgccggcgccgcccatcgaaacgccggtcacgtagatgcggcactcgtcgatcgcgtattcgcgcggcagcgcgtacagcatgcgggccagcaggccgatgtacggcacccagctctgccccgcggggcactgcggcgccagcacaaagcacgggtgctccgcctgccacgcaggcgcagtgaaggcgtccacgcccggcgtgaaatcgagcaccttttcgatgtcgtctccgcgctcgcccgcaccgtgcagaaagagcacgagcgggtatttctcccccgccgcgcaggccggctcgtagagcgcggcgttcagacagcggccctcggccttcagttcaattgttttcactttccgttcctcccatcagatgttttccagaagatacggcagcagccgttcgagcaccaccgcatagccgtttgcgtacatgtgcatgccctcgatcgtgtattcggcgcgcagattgccgctttcgtcggtcaggcagtcgaacacgtcgatatacgcgcagccgagcgacgcggcgagcgcctccagctctgcgtttacggcgcgcagctccgcattcgtgcgcgcgccgaacatcgcttcaacctgcgcggggtctgtgccgggcagcgcgcggttcaccgggtagtagctcagcacatagattttggtttcgggcagccgcaccttgatctgctccagaatctttcggtattgcgcgagcaggcgcgcacgcgtgtagccggggcggctgatgtcgttcgtgccgatattgatgaacacctttttcggctcgagcgcaaagaccgactcctccatgcgctgcagcaggccgtctgtcacatcgccgccgatgccgcggttgtagacgcggatgcgcggctccacattttgcagcatctcgctgattgggaacagctcgcacagcgacgagccgacaaacaccgtctccccctttttcgccgccgcgttcaggcagcggaaattctgcaccttgatttcataatccgtcatacagcttacctcctgcggcgccggttccggggccgcttctaatggggcgcgccgaacgcgcccgttttttccatgatagcacaaaaaagcccgcagtgcaacggcggcgaaaaaaaacgcgtctgcaaccgtgttcggctggggcggctttgtcccacaccgccccgggacgcggagccgggctgccctgacccggcagttaggattgtgcagcgttatgtaaacgcaccgccgcatacgccgcgcgcggcggcgcagaatagaaaaggcggccttcccattggaaagcgcgccttctcgtcactttttcatgtcgtacgtgcggacaagccgctccacatccgcctcggtgcggatctcattctcgtgctcggagagataggccttcacttcctccggcaggtcggaaaaacgcgggcgccagtcaaagaccgccgcgccgagcgcgaaattctccggcccccagaactggccgccgttgtagctgttcggaaacataaaaattcacccccgacgctattgtgggcgccgggggtgaaaagatacctgtcaaagatttctgcccgcctgctcgaagaacttcgcgtgaatcgccgcgacagccttcgccgcatcctgcttttcgatcaaaaccgaaatcttaatctcactcgtcgaaatcatctggatattgacgttcgcgtcgaacagcgcctcgaacatatcggaggcgacgccggggtgcgactccatgccggagccgacgatcgagaccttcgcgacgttgtcgtcaaacacgacgctgctcgcgccgagcagctcggtgtacgattcgagctcctcgatcgccgtatccatcttatccttttcgaccgtgaagctgatgtccttcgtgccgttgcggccgatggactggaggatgatatcgacgttgatgttcttctgcgagagcttcgagaaaatgcggaacgcaaggcccggcttatccggaacgccgatgatcgagattctggcgatgttgtcgtccttggcgacgccgctgatgagcattttttccacgttgatgacctccttgacaatcgttcccttcgcccgcgtcaggctggaaagaacctctaactcaatgtgatattttttcgccatttcaaccgagcggttgttgagcacctgcgcaccgagcgtcgcaagctccagcatctcgtcgtaggagatgacgtcgagctttctggccgccggaatcttccgcgggtcggccgtgtagacgccgtccacatcggtgtaaatctggcacaggtcggcgtgcatcgaagccgcgatcgccaccgcgctcgtgtcgctgccgccgcggcccagcgtcgtcatatcgtcgtacttgttgatgccctgaaagcccgtgacgacgacgatgttgcgccgggagatttccgcacggatgcgctccgggttgacgcgcttgatgcgcgcgctgccgtacgccgtggaggtggaaaagcccgcctgccagccgagcagggagacaaccgggtagccaagctgctcgatcgccatcgcgagcagcgaggccgagatctgctcgcccgccgtcatgagctggtccatctcgcgcttcgaggggttcttgttgatttctttcgccttttcgatgaggtcgtccgtcgtatcgccctgcgcggagacgacaaccacaacgtcgttgcccgcgcggtaggtcgaggtgacgatgtcggcgacgttgaacagccgctcggcgtcgcgcacggaggaaccgccgaacttctgaacgatcaatgccataggataacacattcctttctgccgggcacagagcgcgcccgcgcggcagcgccgcggtgaaatttattcgatgatgatctttgcgccctcggggtcggcgtgcagaatctcgacgcgccagccgctgacgccgcgctcctcaaggtgcgaggcgcagtttctgccgaatgcctcggcgccggcggtatcgatcatcgagatgatcgtggggcctgcgccgcttacataggtaccgagcgagccgagctcgtagctcatgcggaaaacactgtcgtaatggtcgatgaggccggagcggtacggctggtggatgcggtcctgcacggcgacgcgcaggttctgcaaatcgcccgagaagagcgaggccgtcatcagcgccgagcgcgaaaggttgtagaccgtgtcctcgcgggagtaggacgcaggcagcacgccgcgggccttttcggttttcagctcaaagggcgggatcataacggcaaagctgatcttttcggaaaccggcacgctcacgctgtacacgcgccgcccctccatcgccgaagcgacgaggccgcctgagatcgcagggcttgtgttgtcggggtggccctcgatctgcgccgcaaggttgataaggtcggcctgcgagagcggcgagccgagcatgcggttcgcgccgaggatgccggcgacgatgcaggccgagctgctgccgaggccgcgggccatcgggatgttgttttcctgccggattctaaggcccggaagctgcttgccgcagatctcgtagaggtgctttgccgcccagtagatcaggttggattcatcggtgggcacccgcacaccgtccgtcgcggcgatttcgagcgcgtcggcctcctccatccagacgcggttgtgcatcgtgagcgcaatgccgagcgcgtcgaagccggagccgaggttggcgctggtggccggaatatcgattcgaatcatcgggttcgtcctttctctcaataatcggaaatccggatgcggttgagaacccggacgccgcgcgcctcaagcgcccggagtttttcctcaagcgcggcctcggtcaggccggagacggtgaagcccgcttcgcccttgaccggttttttcgcgagcagacgcgtcgggttttcaaacaccgcgcatgccgcctcaaacgccttatcgccgctttccgccgccgcgtgcacgtaagcgctcgtgtccatcgcgccgaaatccgccacatagccgggctttgcgtcctcccagtagaggtatttgcgggccttgaaatgcttcacgcagtcgatcacatccgccacgacggcgctcgccgtgggcagcttgccggcgcccttgccgtagaacacgacgtcgccggtcgcatcgccgcgcaccatgatgccgttaaacacgtcgtccacgcttgcaagctggctgccgcgctgcacgagcatggggcaaaccataatatgcacctgcccgttttcgagcattttcacggagccgatcagcttgatgacgccgccccagacatcggcaaaatcgacatcctcgagcgtgattttcgtgacgccctccgtatgcaccgattcgggatacacgtgcgtgccgaatgcgagcgacgcgaggatgcagatcttgcggcaggcgtcgtcgccctccacatccgcgcgcgggtcgcgctccgcatagccgagcttctgggccagcgccagcgcgtctgcaaagttcatctgctcgcggatcatcttcgtcaaaatgaaattcgtcgtgccgttcagaatgccggcgatctccgttaccacgttcgcggcgaggcactggctgatcggccgaatgatcgggatgccgccgcccacgctcgcctcaaacaggaaattcaggttgttttcctgcgcgatgtgcagcagctcggcgcccttcttcgccacaagctccttgttggaagtgacgacgctcttgccgttttcaaagcaggccttcacgaaatcatacgccgggctgaggccgcccatgacctccacgacgatgcgcacctcggggtcgttcaggatcacattgaaatccttcacgaaccggtcgctgtacggcaggccgggaaactccttcaaatcgagaatatatttgacctcgatggcctccttggcgcgctttcggatgctctccgcatgcgtggtgagcacctccagcacgccggagccgacgacgccgtgtccaagaactgcgatatatgccattttcctcttcctttccctgttttaaccgacgatgctgtcgatcttgatgacgccctgcacctcgaaaagccgcttcaaaagctcgtcaacctcgatgctcatgttttcgctgcgcgcggaaacggagacgaacgccttgcccttcaccggaatattctggttgatcgtcaaaatattcgcgttcgcccggtaaaacaccgtgagcaggttcacgagcacgccgggcttatcgatcagcacgacctgcacggtcatgattgcgcccgtttcctttttcgtgtacggaaaaacggcgttcttatacttataatagacgctgcgcgagatgccggccagcttcacggcctccgaggtattggaggcctcgccggtttccaaaagctggtttacacgcacgaccttctggtaaacctcgggcagaacgctctcgtcgatcagcagataggatgtgttgttcattgtccaccacctgaatacgtttgtattgcaacgacatacagtttaccacattccgcggaaaaaagcaaccccaaaccccaaaaaatccgccccagtatagggcggatttttttgcagcttgtataaagatcgtataagcgctttgaaacggctaggccgcgctcgccactgtcggcgcatccgtcgcgggcggcggctccggtgtgatctccggcgtcggctcagctgtcggttccggggtgggaaccggcgtaggctccgccgtgggaaccggtgtcggctccggcgtcgggacgggcgtaggcgcctgcgtcaccggcggcgcggtcggcgtgggagacggagacggcgtgggcgatacgctcggcgacgggctcacggacgggctcggcgagggttcggcagtcgccgaggggctcaccttcttgcccgcgatgtgatccgagccgccgttgcaggtgcccggcacattgtcctgcgagtaccagccggtcgcgatgtcatagcacccggagcccgggcgcttgccgctgctgcggcagtaggacatctgcaccacgttgtcgctcagcacatagctgccgctgtgcaggaaatcgtagtagttttccccgagccagtcgatgatgccgttgtacatctttttcgcgccgttcgagtcgtagatctcctcgaggttctcgtggccgtaccagatgccgcagacgaacgacggcgtgccgcccatgtaccaaaggttgttgacatcctcagacgtaccggtcttgccgatctggtcgaggtcgctgcggtaaacctgattcgccgtggcgtaggcgccgctcgtgccctcgatcggcaggtgcaggagcttgttcataatcgtcgcgttgtcgaacgacatcgcctgctcggcctcgcgctgctggtaatcgtagatcacgttgccgtcgtgatcctcgatgcggtagatcgtgtacggctcgtaatacttgccgccgttgccgaacacctgataggccgcggtcatttcgcggacgctgatgcccttgtcgaggccgccgagcgaaacgccgccgaggttgtaggcgtcattctccgtgagcgacgagatatgcagcttctcggtcaaaaactggaagctgaccatcggcgtcatctggttgacgagctgcaccaccggcgcgttcagcgattccgtcagcgcgcggtccacattcgtgttgcccacgtagccgggcgagaaattgctcgggccggccgagccgtcggggaaatagttcggcagcggctcgtccttgacgacggagccgtaggtgatgaaattgttctcgagcgccggcgcgtaaacgccgatcggcttgatcgcggagccgggcgagttggtcgtcgtggagacgttgttccagccgcggtttccgtctttttcgatatagttgccctctgtgtccaccttgttggagttcacggccagaatacgcccgtcatactccatcaggcaggcgccggaccagacgtcgttgtcgtctgtaaagctccgccagttatttctcagcagctcctcgaagccctcctgcagcggcacatactgcgccgtgtagatcttcaggccgctgttgtagatcatatcgatcgcgttgtcctcgtccacgttcgagtattccatcaggatgtcgatcgcgtcctcaaagacctcctcgtcgtaccagttccagacgtcgttttggaccgacgcatccccgtcgtcctcgccgtccgcatcatcgttcgggtcagcgtcaaaatcgatgccgcggagcttcaggttgtcggattcctcgaaggccgcatcgcgttctgccttcgtgatcatcccctgattgtacatctcctcgataaccgtgtcgcggcgctccttgttctcctccgggtagtaaaagacgcagagctgcgcggggttctgggtcgtcgccgcgatcgtcgcgcattccgcgatgctgcactctccgatgtccttgccgaagtagccccgcgccgccgcctgcacgccgtagtagccgttgccgtagttgacgaggttcaggtatgcttcgaggatctcatccttcgtgtattccttttcgaggttcagcgccatgaagatctccttgacctttcgcgtgatgctgacctgattttcacccgtcaggttcttgatgagctgctgggtaatcgtggagccgccggcgctgtccgagcctgtcacaaggccgtacaccgcgccgagcgtgcggtaccagtccacgccgttgtgctggtagaagcgcttgtcctcaatggcgaccatcgcatccttcataatctgcgggatctggttgaaatcgacgcgcgtgcggatctccgtgccgttgtagcgcatgtgctcggtccactccgccgagtccacgctgtcgatgtgcagggaatccgtcacataggcgtagctcgattcgttgagcttgaacgacgagaggctcgccgtgagtttagaatcgtggtagctccaaataaccgaaagaacgctgaggccgacgaggccgccggagatgatgccgatgaaaaggacagtctttaaaaactttccgaacatcgaaagcaccgtctgcgccgtggcgcccgcagagcgggccatttcgccgtcggtgcgccccatcggcctgccggtcatctgcgtcgtgttgtacttattgatatcttctttattgagcacgatgaacctcctgaaaccatttttgtgcacgagcggcgggcatgtatatttttgccagttttcgccgatactatgcacagcagaaaaagtttgaaagccatgcgaaaggacggttttttatgaaaatcgaattgaaacccattcagccggacgcattccggagatatacgcagtgggcggcgctcatcacggcgcttgcattgctgttcaccgctgcggcgctcgccgtgcgcgagtccgtccccgacgccgtacacacggacgtcgacataaattcacccgttcattatagctcaaacgaaatggcaagtcaaggaaacagcacggcggatgcggcaaattcaagaaatattaagaaatccgaggatttctatacaatccgtgcctttgaggacagcgtcgccattttcaaaaacggcgagccgaacccggtgtattccatcgacacgccgctctcccggctgacagacgccgaccgcacgctgctcaccgccggcatccgcgtggaatcgctcgccgaggcctacaagcgcatcgaagattacgaataacgcgcccatccgcgcgggaaagaagctgcgcatagccgtttgtgcggccgcacccaccctccgcacggggtgaagcgctgcacgtgggcgaggccgggaacagctgcgagacgcacccacctgcgcgggaaggaagcacgtgcagaggccccggcgcacgccgccctctaacgcgccctgccgtacaggagacgaaggcgccgggctgctccgcgtattcccggagcagccgcgctctatccgcacgccgctcgaggcgcactgcattgccatgcctcgcccgcgcggggaacgatgtgcctcccgcgtctggtgttccgggagataaaaccatgccccgcccgcgcaggagacaaagccgcggccgcgccccgccgctatataacgcgggcaaaagaaaaggacgcccgtttccgggcgccccgccgtgaagagaaattacttcatgctctcttcgtaggacttaatcatcttcttgaccatctggccgccgatggagccggcctgcttggaggtcagatcgccgttgtagccctgcttgaggttaacgccgacttcgttcgcagcttccatcttgaaacggttcattgcatcctgtgcctcggggaccatcgtgttgttgttgctcattttcttttctcctttttttcttttctcgcgtttgttgttattattttgttttcggaaaggagctttatgcgtgacagtttttagcagaattctcagattttcacgccgcgctgccgagcaggcgctgtcgcccgccgtcatgcgtgcgatcgcgcttgccctgcgcgaatagcgcgcgggatccgagccgccgcgcgccccattctgtaaagtgaattcgctttataggcatgcaaagcgccgcagcccggacggaggctgcggcgctttgtcccgcgggtatcgccgcgcggctgaacagctatacatctgtaaagccgttcgactatacagcttcaaaggctattcagccgctttgctttctattaaaatagtgcgtatgccgcgcggcgcgtcacggcgtgtcacgcagctttttttcgagctgcagcaaatgctggtcgtacgtatcgatctcgccccgcagcacggcgagcgattccttgagggcgcgttccttttcctctaaggcgctgtactgcgcctttaaaagcgcgaggcgctcgggcacggtctcgtcgccctcgcggcagaggcggctgtatttttgcagcatcgcgatggagcacccggcgccgcgcatgcacttgatgaacttgacccagccgcgctcgtactcgccgtaatcgcgcacgccgtgcgcatcgcgcggtaccggcggcgtcagccccttttcctcgtagaaccgcagcgttgtcggcagcaggccgaattcttcggccacctctttgattcgcatattccgttcccctttacaaaaaaattctgtgcggtgccgcggcacgggccgggcgcggacttctgcctatcagtttaaaccctataccctgctggaagtcaagccttttttgccgccgccctgcggtgctccccgaaaacgcaaaacggcgcctgccgcagcatgcgggcagacgccgttatttcgtttttctttacgggcggaacgagcgcttgacgcgcaggcggttgatcgcgcgggcaaggtgcgcctgcgccatcttgtattcctgcacggtctttttttgcagcatcgcctctttggcctcggcgatggcgcgctccgcgcggtttatgtcgatctcttcgggacgctcggcggaatcgacgagcacgagcacgtcgttgtcctccaccttgacgagccccgccgaaaccgccgcaagctgcgcgggctggcccggcaggcggtaggtcatcgtgccgggcacgaccgccgcgatcatgttgctgtggttcgcgaggatgccgtaatcgccctccgtcgtcggcaggatcagcgattcgcattcgccctcgtaaaacgggctgttcgcgtggtagatgtgtacctgaaacgtgttcatcagaccgcctccgccgcgagcgccttcgccttcgcgacgacgtcctccacggtgccgacgttgaagaacgccgcctcggggtattcgtcgagctcgccgtccacgatcgccttaaagccgcggagcgtttccttgagcggcacgtatacgccggggttgttcgagaatttctccgccacgtgcatcggctgcgaaaggaagcgctgcaccttgcgcgcgcgcatgaccgtcatgcggtcctcgtcgctgagctcatccatgccgagaatcgcgataatgtcctgcaattcgctgtacttttgcagcgtctcctgcaccttgcgcgcgatgcggtagtgctcctcgccgacgatgtcggcctcgaggatgcgcgacgaggattcaagcgggtcgacggccgggtagataccctgctcggcgatcttacggctcagaaccgtcgtcgcgtcgaggtgggcgaaggtcgtcgccgtcgccgggtcggtcaggtcgtccgccgggacgtagaccgcctgcaccgaggtgacggagccctccttcgtcgaggtgatgcgctcctgcagctcacccatctcgttggcgagcgtcggctggtagccgaccgccgagggcattctgccgagcagcgtggaaacctcgctgcccgcctgcacgaagcggaaaatgttgtcgatgaaaagcagcacgtctttgtgctcgcggtcgcggaagtgttccgccatcgtcaggcccgaaagcgcgacgcgcatgcgcacgccgggcgattcgttcatctggccgaacacgagcgccgtcttatcgccgacgccgctctcgcgcatctcgtgccagaggtcgttgccctcgcggctgcgctcgccgacgcccgtaaacacggagtagccgccgtgctccattgcgacgttgtggatcagctcctgaatcagaaccgttttgccgacgccggcgccgccgaagaggccgattttgccgcccttcgggtacggctcgagcaggtcgatgaccttgatgcccgtctcgagaatctcgacggccgggctctgctcgtcaaacgcgggcgggtcgcggtagatgctgcggcgctccgcctgatcggaaatcgcctcgccgccgtcgatcggctcgccgaggacgttgaacatgcgcccgagcgtcgtctcgccgacgggcacctcgatcgtgcggcccggcgcctcgaccggcatgccgcgggaaagcccctcgctgccggcgagcatgatgcagcgcacggtgttgtcgcccacgtgctgcgcgacctccatcacgtacgccttaccctcgttttccacggtgagcgcttccctgatcttcggcaggctgccggcctcgaacgcgacgtcgataaccgggccggagatctgtacgatttttcctgtattcaaaatgctcacgcttccttcctgtgttttctgcgctgcgccttcgcgcccgcggagacctcggtgatctcctgcgtgatcgcggcctgccgcacgcggttgtattgcagggaaagctcgccgaggagcttttccgcgttccggtttgcggcgtccatcgccgtcatgcgggcgttctgctcgctgcagaagctgtcgatcagcgcgctgtaaataaagccggaaacatagctttccatgatattgttgagcaccgcctctatggagggcaaaaactcaaacggctccgtcacggccttttccaccgtcgtcgtcgcaaaatgcgcgcggtgaaacggcagaaggcgcgtgcagtgcgccgccgaggtcaggctgttctccatatcggtgtagatgacgaagatcttttcaagctcgccgcggtcgaagccgtcgagcagaatcgcgctgatctcgcgggcgcggtccatcgtggggttctgcgccgtgtagagaaagctgcgctcgatcgggatgccgtgctgggcgaagaagtgccgcccgtattcgccgacgacgaacagcttcgtatcggggtgctcgtgcagcatgcgctgcgcttccttgatgacgttctggttatacgcgccggcgaggcccttatccgccgtgatgacgaggcagccgtatgtgccgtcgagcggcggggcgccctcgggcgggtagaagtagcggttatccacatcgcctgccgtgcggaagatgcgcttgatctcgccctgcagcgcctcgaaatacgggcgcgtgcgctcgaggctgtttttcgccttgcgcagctttgtggaggcgatcagatacatcgcattcgtgatcttcttcgtatcctttacgctttcgatccggtttttaatttcctttgtgccggccatagcgctcactgctccttatggctttcctgatattcggctagaaaagctcttgaaaaatgctggatctccctgcggtcgtccaccgaaagctcgccgctgcggtcaattctggcgcagaggtcgggcatctgctgttcagcgcgggcgatgagcgccttctgcatggcgttgacctgcgcgagcggcacctcctgcatgacgtggtcctgcgcggcaatcagcgtgataacctgctcgtgctggctcatcggctggtactgcgcctgccgcagaaggcgcatcaggctctgcccgtaggcgagctggcgcttcgtcgtttcgtcaaggtcgctcgagaactgggtaaagacctccatctcgcggtactgggcaaggtcgaggcgcagcgtgcccgaggcctttttcatggccttcgtctgcgcggcgccgccgacgcgggaaaccgacaggccgacgtttaccgccgggcgctggcccgcgaagaacaggtcgctttcaaggaagatctggccgtctgtaatcgagatgatattcgtcgggatataagcggaaacgtcgcccgcctgcgtctcgacgatcggcagggccgtcatgctgccgccgcccttttcctccgagaggtgggcggagcgctcgagcagacgggagtgcaggtagaaaacgtcgcccggatacgcctcacggcccggggagcgctcgagcagcaggctcagcgcgcggtacgcgatggcgtgctttgaaagatcgtcgtagacgatcagcacgtcgcggccctgatacatgaagtgctcgccgagcgcgcagcccgcgtacggcgcgatatactggagcgaggccgaggtggacgccggcgcgttgacgacgacggtgtaatccatcgcgccgcggcgcttgagcgtctcgacaagctgcgccacagagctcgacttctggccgatcgcgacgtagatgcacacgacgttcttgcccttctggttcaaaatcgtgtcgagcgcgagcgccgttttgccggtctggcggtcgccgataatcagctcgcgctggccgcggccgatcgggaacatcgagtcgatcgcgagcaggccggtctccatcggggcgtcaaccggctggcggtcgatgatgccgggggccggcatctcgatcgggcggtaatcggtggattcgatgtccgggccgccgtcgatcggcgaaccgagcgcgtccacaacgcgcccgagaaacgcgtcgcccaccgggatgccggcggtgcggccggtgcggcggacgatgctgccctccgaaatcgaagcgctgtcgccgaaaagcaccacgccgatctcatcgcgctttaagtcctgcaccatgccgcgcacgcccgaggcgaagagcagaatctcgccgtaggccgcgtgctcgaggccgctgacgacggcgatctcgtcgcccaccgtcagcacgacgccggtctcctccgccatcgcctcgggcgtccagttctcaatggcgtcctgcatcagcgggatcacggaatccgcgccgtgggtcagcttagaaaggcggtccttaaactgctgcaagcgcccctcaaggctccagtcgtaaatatcggcgcccacctgcatgcggaaatcgacctgcaggcggaagccgccgtgcagcttcgggtccttctcccagcgcagcgggatctcctcgccgtacttgcggcgcagaaaatcgccgaagcgcttttcctgctccgcggtgggctgaacgtcgctgtagagaatggccaaacgctccatctggttcgcgttactcattcggctctcctccctccgccttgtcgaggaagctgtcgaacacgtcgccgtcgttcttatagaccagcttcttcgcggcctccacggcgagctccgtcagctccttctgggtatcggcgaggatcttctcacgggcgcggccggcagacttgtaagcgtcctgcacgatctccgccgcctgcgccttcgcatcggaaagctgctgctccacggaggcgtccagcgcgcgctgtgcctcggcccttctgcggtcgatctcctcgccggcggtttcaagctgggccgcgtaatctgccttcagcttttccgcagcctctagcgtctgcgccgccttctcctccatgccgcggcagtattcctcgcgcttggccatgaatttcttgaccgggttgaaaagcaggaagtacaggccgccgaccagaatcacaaagttcaatgcatgcagcagaatctgctgccaatcaatattcaatggcacagtccacacctgcctttacaggacgaagataatcaggatgacgacgagcagcgcgtagataattgccgtttcgataaagacgaggccgagcatcagcgtcgtgcggatcttgccttccgcctcaggctggcgggaaatgccttccacggctttgcctgctgcaaggcccatcgcgatcgcgccgcccgcagcggcaaggccgacggcgaggcccgaggccagcgctctggagccggcgccgtcgtcggccgcggccgcttcgtcatcggtgttctgcgccgacaccgcagccggctgcgcaccgttgtctgcggtttcagcaaataccgggatcgcgagcgcaagcagcgcgatcaccacaagcaggatcatggaaactctcttcagattgattttcatcgtgaacattcctttctgtcaggccgcctcggcctttgcttttttgggtgcttttttcttcttctcatggacctccgaaacctcgccgtaatacagcgcaacgagcatcgtgaggacatagctctggatcagcgcgtgtaaaagcgtgaacatcacgcccacaaccaccggaagcacaaagctgagattgacatagtagtagaccagctccgtcacgagcaggccgctcaaaagcgcgccgaacagacggaagctcatggagatgggcagcgaaaattccttgagcgtgctgcccacgccgcgcaggccgttctgcgctatgccgccggacagaatcacaaggtacgacaggcagcccatcgcgatcgccgcgttcacatccgaaagcggcgccggcagcgtgatcgtcgcgccggaggtcgttgcggcctgcacgccgaacagctcgaaaaacgtgctcacaaaaatgtagacgccggcgccgaaaatgtacgcgccgaggaacccgttgcggtgcgggctgttcgacttcgccatgttgtcaaacagggagacgagctcctccagcagaagctggaagcggcccggccgcattttgaaccgcggcacagcgaaaatgcggatgcacgccgcaagcaccagaagcgccgccgagaccgttaccgccgaaacaaagcccgggttcacgtctttcaggccgaaaaagctgattctgcccgtatcgtgcagaaccgcgtcgcgcatggtttcctgaattgattcgctgcgcacgccgcccggcgccagaatgctggcggcaagcagaaccacaacgagacagacccatgcgatcagccattttttcctttctttcatcgtaaccaccgcgcccttgcagtgcaaaggctatcctttcctacgaaatctgagtgtgcgccgcacgcgcgggcggcaaaacccaaacacgctgtgtgaagccccgcctatcggtaccgcggcggcaccgcaggtgacgcgacaatgccgcaggcagcgtgatgatagcacaggcagcacttcacacaaatattcccttctttcagaatctccggctttttgccggaaatacgcggctgccaccgcctccttcctaaaccccgccgacagaatgcaaccgcatccggccgcccaaattgacggacgcagaatgcggcccctttatactttcattttacgcgtgaaaccgcggtctacagccgattttttagggttgtattccgcaatcgactgtattatactatatacaatcagaagatgtaaaatatatgtttgatatatccggcattcgtttttgatataagaaagcaggttgcacaatggtcacctacgattactaccgtattttctactttgtggcgcaataccgcagctttacgcgggcggccgaggcgctgaacaacaaccagccgaacatcacgcgctgcatgaacaacctcgagcaggagctgggctgcaagctcttcgtgcgctcgaaccgcggcgtggcgctcacgcccgagggccggcgcctgtacacgcacgtcgccgtggcctacgagcagcttcgcgccggcgagcaggagctgcgcgacgattgcagcctcgaaagcggcacgatctcgatcggcgcgagcgaaacggcgctgcacctgattctgctcgaccgcctctcggcctttcaccggcagtacccgagcgtgcacctgcgcgtgacgaacgattccaccccgcaggcaatttcggccctgcagcgcggcctgctcgactgcgccatcgtcacggccccggcgggcgccgcgcggccgctgcgcgaaacgcgcctgctcgccttccgcgagattttgctcgggggcacgcagttccggcaccttgcggcgggcacgcacagcctgcgcgacctgcggcagtaccccttcgtttcgctgagcgagcacacgagcacctacaccttttaccagaacctctttttgaagcacgacctgccgttccacgtggacatcgaggccgccacgatggatcaggtgctgccgatggtcgagcacaacctcggcatcggcttcttttccgagacgctcgccgcaccggcgatcgagcagggacttgtgttccccatcgccgtgcgcgaggcgatccccgagcgcgccgtctgcctgatcgaggacaccacccacccgcagagcatcgcgctgcgcgcctttaaaaagctgctgtgcgcggaaaaaaccgcggaataaaccgcagcttcccccacgcacatcgcgttatatcgtgatcgccaccgtgacccccgggttcttctccccggcgatcacgatcgtttcgatcagcttatttacataatccagcaactcgccggtgagcttcccgtaaccgacaagctcgatctccgccgcgcaccgcgggctttcgagcgccgcctgaagcgccgggagcgtcggctccacgcggcgcaggcgcagctcggcgttgatgtaatcgtgcaggtcgcgcacaccccgcacggtcgtcaggtcaatttgcacgtacatgatacttccccagcgccttcaggcatttccataggcgagggcgatctcgcgcaggcacaccgcgtcgcgcgccgccgtgacctgcacgcgcacgccggagagctttttctccgtgtggccggtcagcgggttctgcacggcgaacggatcctccagcaggcagatctgcttgttgccgatgcaggtgccctcgtacagcgcgtaatcggccttgccgccgacgaggccgaggatgcggaagccctcgacgcgctggccctgcgtgaggtcctcgcgcaggatgacgcagccgatctccgccggctccgccgtgcgcacctcatagacgggctgggtctccgtgccgcccacgcgctccaccgtgcaggggatgcggttttccaccgtgcgttcgatcaggtcgccgagctctttcaggcgctgcacgtcgcgcgcgtcgatcaggccgtcgcggttcggcggcacgttgaggttcaggcaggcgttcgcgccgcaggagcgcaggtacgtcttatagaggcgctcgagcgaatgcggctcctcgttttcgtgccagaaccagccggggcggatggacatatcgatctccgccggggcaaagacgaggccctttgaatagaggatgttcggcatggtgccgatctcacggttcgtgttgtacatgtagctgagcgaaccctcgtccgccatcgggccggggccggtctgcacctcgctgtaaaagcacagctcgcccggcaccaccgcccactccgagtggcgcgccacgccggcctcgttgccgcaccagcgcgtatcggggccgtagtcgttgaaaatcacggcgttcggctggtgcttgcggatcagctcaaaatagcgcgggaaatcgtagtcctgcttcttgccgttctcaccctcgccgcaggcattgtcgaaccacacgcagaaaatatcgccgtagccggtgagcagctcctcgagctgattgcagaaatagtcgttgtacgccggggtgccgtacagcttcgaattgcggtcccacggcgagagataaaagccgaatttgatgccgccgcgccggcaggcctcggccgcctcgcgcacgacgtcgccctgaaacgggctgtttttcacgctgtgctcggtgtatttgctcggccacaggcagaagccgtcgtggtgcttcgccgtgagcacaaggcccttgagccccgcagccttgatcgccgcaacccactggtcgcagtcgagctttttcgggttgaagatcgcctcgtcttcggtgccgtcgccccattcgcggtccgtaaacgtgttgacgccgaagtgcacgaacgcatagcgctccgtctcaaaccaatcgagctgccgctgcgagggtacgacgtgtgccgcttcttttataaaatccatcatcgtttcattttcctttcctgccgggccggcacaggccgcccgaattcgccttaattatagcaggccgccggaaaaagtcaacaccgaataaatacgccccgccacttgaaaacgcggccggattctgttaaaataaaacaacatagcagagctttttggaaaggagcggtcacccgcatgccgcagcgcgcagaccagaccagaccagaccagaccagaccagaccagaccagaccagaccagaccagaccagaccagaccagaccagaccagaccagaccagaccagaccagaccagaccagaccagaccagaccagaccagaccagaccagaccagaccagaccagaccagaccagaccagaccagaccagaccagaccagaccagaccagaccagaccagaccagaccagaccagaccagacggtattctaactctggtccttttttgctgtcaagcggtaaatttcaatcattttttcaaggcgcagcctgtccgttttttcgcggatgggccgcgctttaatttttgatcccaagccatcaatactcaaaacacaaaggatgaagtatatcatgaagaaaaaattactgcaccgcctgtgcctcacactgatcgtcgccgccctgctcactgttttttcgaccacggcgtttgccatgcagattttcgtaaagacactgaccggcaagcacatcacactcgaggtggagcccacggacaggattgaagatgtcaaagcaaagattcaggacaaggagggtattcccccttatcagcaggagctgatctacgccggaacgcagcttgaagacggcaacaccttgcaggattacagcatccaaaaggacagcacgctccatctcggattaaggcagcaccgcacaattgctgaggcaagcgctgtcgaatcacccatcaggcaggaaaccataggcttcccggcgcatttcttcgcgagagcgcacaacttcaagccgccaggcagggcctgtcagccagaagcagattcgccaatgcgaacatgatattgaatttggctcgctgcttttcgagccctcggtatcgcgtttttcgaaattgcagctgtttcttgacgacaccgaatacgtgctctacttttgcccgaacagaagactttgcgtgttctgctttctttgcggcatactggccgctcttgctcagcttttttaattgagatggacgtcggttaattttgtatttgatcttgcgtccggatttgttccgaacgatcgcgtcctcacggttcccggctccaagatagccactgtcgccgtaaacgacatcttcctcaccggtcagcagggatgaagtctgcgtcacatcatggacattagctggtgtcgcctccactgtgtgtaccagtccgctgtccttatccaccccaacatgggctttatagccaaagtgccatgtgttgcccttcttgacctgatgtgcatccggatcccgctttttctccttgttcttggtggaagacggcgcggaaataatggtggaatctacgatcgttccctttttcaggataaggccctgttcagtgagcgcggtaacaacttgtgcaaacagtttctcctgcagtccattcttcaccagcaggttccgaaagcggccaatggtatctccgttcggcacctgattgctggaatcaacgccgcagaaatctgaaaatgcccggctgtcgattgcctccgccgctgttgcttcatcactcaggtcatacagattttgcagcagatacaaccgcagcatggtctccagtggatagggtttattgccgcgctctcctttgtaatagcacggctggatcagcgtaagccattccttccacgggacgatccgctcgatctgggctagaaattctttcttctttgtccgtacctgcgccaactcatcactaagcgcagacattgtcatctgtttatccatggtcttattatatcacttctggcagtatcgcgcctacttttctgtgcggtattgccttaaagacatgcacagacacagcgcacctccggcctttgcaaaaaaccgaagccacgccgcccacgcatttgaccgagggcaatatcgcgtactggtactgcgacgactgccagcggtattacagcgatgaaaacggcaccgccaaaattacgcttgcggatacggtttcgcccaaactcccggagcacactgccgacggtaccggctggtacaccgacgcgagcggccactggaacacctgcgcgtgcggcgaaaagctgaacgcggccgcgcacacgctggagtgggtcacggacaaggaggccacggcgacggaggcaggccaaaagcacgaggaatgcgcggtctgcggctacaagctggccgcggtcgagattccggcgctcggcacgccgacccctgccccaagcgcctcgcccgcgccgaccgtaaccccggcgccgacaaccacgcctgctccgagcactacccccgaggcgacaaccacgcctgccccgaccgtaaccccggccccgacaacgacgcccgccccgagcacttcgccggagacaacaccggccccgaccgccgcgccggaggccacggcctcccctgcgccgaccgcgacgccggagccgggcctcggccccaagacgggcgacgcaggcgtttccgcgctctggttcgctctgccggccctctccgcgctcggcctcgccggcgcagcagccgcgcggcggcggaaatcccgctgatttccccgcacgggagcgcccgcgcgaatgacctgccgcaataaaacataacagccgaaccgcccgcagccttctgagccgcgggcggttcggctgttttgggccggcgcgcatcccttaccgcgcggcagatttttccgccggcgccgcgccgtaccgcagcgatttgtacacggccgtgccgacctccaagcacgtcgccagcacgcagaggccgaacaggatgctcgaggccgcatcgccgttccagtacgccgtccactgtggggcagcgccgagcagatcctgcagctccacggcaaaattggggttccaaaccgggaacaccttgagcacgatatagctcagaacgagctgtactgcgccgcaaacgatgctgctgaccataaccggcctgccgtagcgcccggctgcgagctgcacaacctcgtcgatgaggccgacggcaaggctcagcacaaaaacgggcagaattttatgccactgcgcgaggttgaacacgggcacggcctgcatcacttcgccgttccaccgcatggcgctgaaaaccgacggcgtgaagatcagcagcacgcagaagatcacgatgaacacgatgccgacgatgttgtccccgcggctgatctcagcctttttgtgcggcaccgcctcaagcgccgacggcgtccaagccgcggcattccgccgcctgccgctctcaaagtgcacgcgatgccgctccataagcgcgaagatcagcgtgaccgcgccgaacgcgcccaagcaggccgcgaaagcctccgccaaaccgccggcgacgccctgcacggcggccgtcacgcccgcctgcatcacgctctccaatgccgcggcaccgcgcacgccctcgatcgcgcctgccgcgagcgaggccgccgcagtgcagatcagcacgatacgcagcagccagacgtaattctcaaaatacgccgggccgatcaaataccgcgcgccgtcctgatattttttcgcaaactccgccgggtcgccgagccgcgccagcaccgattccatcgtgccgccgtcctccagcatgtcgccgatcagctcctccagttcgcgcgcaacctcctgccgctggcttttgggcagccggcgcgtcacggcgtaaacatagcgctccatccattcctgctcaaccgggttcatcgtttcttctcccttctcccgtgcgcggcgcttcgcacgccgcgcggctctcctttttcaacaggccctccacaccggccgccatctcccgccactggcatttcagggcttcaaagatctcgtcgccgaacggcgtgcgggtgtaatacttgcgcggcttcgggccgtctgtttcccagcggctctccaaaagcccctgcctttcgagccggcgcaaaagcgggtacagcgtattcgggtcgatggcgacccctttctcctccatgcactgcacgagggaatacccgtagcgcggcacatccatctggctgagcacgctcagcaccagcgtcccccggcgcagctctaaaagcaaactttccaaaaggccgcgttcctcgcccatccgtatcaccccctaccgtacagcgcgggtcgcggcagtccgccgcgtctgccccctgcctttgatttcattatactgtatgttgcacactattgtcaatattaaaataaatgaaattcaccttacagccgcccgctaaggccccgccgcagcgcgctgcccggcctgccccccaaaagcaaaaaggcggagaccgcgcgctttttccgtgccgtctccgccttttatttgtttttgtgccgcgggtcagaacgtgatccgcaccgtggtgccctctccctcgcggctttgcagggcgacgtgcgcgttgtggaacgccgcgccgtgcttgacgatcgagaggccgaggcccgtgccgccgatctgcttcgagcggctcttatccacgcggtagaagcgctcgaacacgcgctcgcggtcgcgctcggggatgccgatgccgtcgtccgccacctcgatgaacgcgctgcccgcctgcatgccggccgtgatgcgcacgctgccgccggcgcggctgtacttcaccgcgttatcggcgaggttgaaaatcatctcgtccagaatacggggcacgcccgtcacgacggccgggccgccaagcacctcgatgtggatgccgttctgctcggcggcgctgtgcaggcgctccgccacgtcgcgcgcgatcgcgtgcagatccgcctctgtgcgctcgagctccaccgcgcgctcgtcgagctgcgagagcttgatgatgtcctcgacaagcgtgatcaggcgctgcgtctcgttgtagatgttcccggcaaagcgcgggatatcctcgctgcggacgaggccgttgcggatgatctccgcatagccggaaatcgaggtgagcggcgtcttgagctcgtgcgaaacgttcgccgtgaactcgcggcgcatgcgctcgctctcctcccgctcggtgacgtcgagcagcacgatgaccgcgccgcgcacgccgctttcgcccatgaccgggttcgcaatcaaattgtagctgcgcgtgccgatgcgggtcacgcgctcgctcgccgtgccgctgagcgccgaatcgacggcctcgcggaaatcgtggctgcggttgaaggtgagcacgctctcgtggcggtgcccggtatcgccgtccacaccgagcaggcgcacggcgctcgtgttgtaggagagcacatcgccgcgcgaatcgacgacgatgaagccctcgcgcatattttcggtgatggccgtgaactcgttctgcttgcggttgagctcctccatcttctcctgaatcgtttcgttctggtgctcgatgcgcagaaagagcggcgcaagctcatcatacacgtcgttttccatcgggtggtcgaggtcgatgttgttgatcggtgcgacgatctgcttcgtgcggtaggtggagagaaacaccgcgaagagcaaaatcacgacggagcacagcaccatccacggcaccatgcgctcgatcgagccgaacaccgttttcatgccgaccgaaaggcgcagcacgcgcccgtcgtccatccgcaccgcgtagttgtacgactgcatgttgaccgtctccgattcgcggatcgactcgcccgtgcccttctcacgcgcggcggcgacctcggggcggtcgccgtggttttccatgctgtccacatccgccacgctgtcaaacgacacggagccgtccgcctcgacgagtgtgacgcgcaccgactgcgcgcccgtgccgtagccggcggagctgatgtggctgaggtaatccgcctgctgctcgatgccgctgcggatgtactcgctctccaccattgtggaatttttgatgatctcgagcgaatcgtaatacgagacgacgccggaaagcaccatcgagaacacgatggagacgagcgcgatcatcgtcatgctccagattattttctttttcatgcttcgtcatgccccccttccgccggctttgccgccttttcggcgatgcggtagccgacgccgcgcaccgtttcgatcaggccgcccatcgcgccgagcttctggcgcagcgtgcggatatgcacgtccaccgtgcgggtttcgccgctgtagttgtagtcccagatcttcgtgaggatctggtcgcgcgtcagcacgacgccgcggttctcgagcaggtagcagagcagctcgaactccttgtaggtcagcgaaacctcgcggccctccaccgtcacgttacggcgcttgacgtcgacaaacagcgcgtcggccgcatagtgcttttcgtcgctctgctttgcggcgcggcgcagcagcgccttcacgcgcgagacgagctccatcatgccgaagggctttgggatgtagtcgtccgcgccgctgtccagccccacgacgcggtcgtattcggtgcttttcgccgtcagcataatcacgggcagatcggccgtttccgcgtcgccgcgcaggcgctttaggatgtgcaggccgtcctcgtcgggcagcatgatgtcgagcagcacgagcgccggctgcgccttttcgaccgcctcccaaaactgcgccgccgtcggaaagcccttcgcctcgaagcccgtcgtgcgcagcgtgtagatcacgagctcgcggatgctgtcgtcgtcttcaacaagataaatcataggacagaatgttcctttcccggggcaggccgtgccgcccccgtaaatcagccgtgctggccggtggccgcaaactccacccactcggcgatattgaccgcgtggtcgccgatgcgctcgaaatacttcgcgatcatcagaaggtcgatgcagtcctcgccgttcgcatggtcgcgcgcgatcagctcgacaagctccttcttcacgcggttaaagagcgcgtcgaccacatcgtcgtacgcctgcaccgcgcgggccagcgcgaggtcgcggcggacgaacgaatcgacgctgtccgtcaccatcttaatcgtcgcgcgcgccatttcggcgatgtggagctggctgtccatgccgttcccctcgaggtgcgcggtcatctcggcgatgtccgcggcctgatcgccgatgcgctccatgtcggagatcattttgagcgccgaggagatcaggcgcaggtcgctcgcaaccggctgctgctgtaacagaagccgcatgcagagcgattcgatgtcgcgctccttgcggtcgatctcgtggtcggtgtcgtaaacggtctggcggaattcgtccgtcggcgtctcgagcgtctttgccgcctgcgagatcacgtcctcgcacaaagcgcccatgcggatcagctccacgttcagcctttcgagctgctcgtcaaatcggtttctcatagctttacttcctttctgcggtatcagccgaagcggccggtgatatagtcctccgtgcgcttatccttcggcatggagaaaagcgtttcggtctttccgaattcgatcatgtcgcccagaaggaaaaaggccgtgttgtccgaaatgcgggcggcctgctgcatgttgtgcgtcaccatgatgatagtataatcctttttgagctccgccgcaaggtcttcgatcttgctcgtcgaaatcgggtcgagcgcggaggtggattcgtccatcagcagcacctcgggctccacggcgagcgcgcgggcgatgcacaggcgctgctgctccccgccggacatgccgagcgcgttcttcttcaggcggtccttcacctcgtcccagatcgcggcctgccgcagggaacgctcgacgatcatatcgagcttcgccttgctgcgcacgccgtggatgcgcgggccgtaggccacgttgtcgtaaatgctcatcgggaacgggtttgccttctggaacaccatgccgacgcgctttctgagctggttcacgtccatgcccttgtaaatatcctcgccctcgagcttcacctcgccctcgacgcggcagccctcgacgaggtcgttcatgcggttgagcgttttcaggtaggtcgatttgccgcagccggacgggccgatcagcgccgtgatctcatgcgcgggaatatccagcgtaatgcccttgagcgcttcaaaattgccgtaccagaggtgcaggtccttcgtttcaataattcccatagtggcttgcctcccaagtcctcagttttttcgcagctttttgccggcgagcttcgcggcaaggttgatgatgaacgccagaatcagcagaatcgtggcgatcgcgaacgcggcgtcgaattccgcgcgctcgctggcgtacatgtaaagcgccacggtcagcgtagagccgggcgtgttcggcgtcacggcctgcgcggggctcagaatattgtgcgcaacgcccgccgtgtagagcagcgcggcagattcgcccacgatgcggcccaccgcaaggatgcagccggtaacgatgccgtccaccgaggagggcagcaccacggtgcggatcatgtgccattttcccgagccgaggccgagcgcgccctcgcggtagctctgcggcaccgttttgaggctctcctgcgttgtgcgcaccacggtgggcagcgtcaggatcacgagcgtaagcgagccggcgatcaggctgctctgcaggccgaagaactcgacgaacaccagcatgccgacaaggccgaagatgatggacgggatgcccgaaagcgtctccgtcgcaaattcaatgatgcgcacgagcttcttgttcgcggcgtactccgtcaggtagatcgccgcgccgacgcccagcggcagcacgatgacgagcgtgatcagaatgacgtacagcgtgttcagaagatcgggcagaatgccgatcgtgcccgagcgcgggctcggctttgtggagaggaaatcccacgagatgtgcggaatgccccggaaaaagatatagccgatgatgccgacgaggacaaggcagacgatcgcgatcgcgatatacatcagcgcgctgcgcagcccgtccataaagcggcggtacgaagatcgtttcattcccacacctcacttttccttcttcttcaaaaagaagttcaaaaccatattgatgagcatgatgaagcagtacagaatgagcgccacggagaacagcgcctgccggtgcaggccgctcgagtagctcatctcgcccgcgatggcggtcgtcaagaagcggacgctcgagaacagggagggcatgttcgccacattgccgcagaccatcatgatcgccatcgcctcgcccaccgcgcggccaatgccgagcacgacggacgccgcgatgccgcttttcgccgccgggaacgacaccttaaacaccgtttcgttccacgtggcgccgagcgcgaggctcgcctcctcgtattcgcgcggaaccgccttcagcgccgtttccgacacgctgatgatcgagggcagcaccatgaccgtcagcacgataattgaggagaaaaggccgacgccgtccgccacatggaacgcttcgcgcacgaagggcacgagcaccatcatgcccacaaggccgtacacgaccgagggtatgcccgaaagcaggtccacggtggggcgcagcacctgatagacgggcttcggcgccattttgccgaggtagatcgcaaagagcaggccgagcggcacgccgatgaggatcgcgccgaaggtgccgaggaccgaggtcagaatgaccggcagaatgccgaactggtctgtgctcggcttccacaccgtgccggccagaaactcgatgaggccgacctcgcggatcgccggtatgccggacacaacgagatacccggtgatgacgatgacgaagccgacggcggcgaggccgcacgcggtgagcagcacgcgcatgaccgtttcggcagcccgcagcaccggacttgtttttttcataccattactcccttatcctttcatgaaaaatgcgggatggaaagcgcccatcccgcatcacggttctcaaatcttcaggcggtccctttgggcggaactcagtgcttgaccgggacgcagcccgcctcgcgcacatactcgtccgcatccgcggacatcgcccagttcacgaatgcctgcgcctcggcgctcagctcctcgttgtcgttcgtgaccatcacgaagttgcgctgcacggcgtagtcgccggactggatcgtctcctccgagcactcgacgccgccgaccgtcacggccttaaccgtgtcatccacagcggagagcgaggcgtagccgatcgcgttcgggttgctcgcaaccgccgcgatcacggcgccggtggaggtgagttcctgattgtacttgcaggcgtccttcgcatcgacaacctcttcaaagccgtcgcgcgtgccggagccagcctcgcggccgatcacaacgacctcgccggcgtcgccgccgacctcgctccaatcggtgatctcaccggtgtagagctgcttgatctgctcaacggagaggtcggcgatcttgctctccgggttgacgatgatcgcaatgccgtcgatcgcgatgacgttgccggtcaggccggcctccttttcctcatccttgaggtcgcgcgaggcgaggccgatatcgcagcggccctccgtcacggcggtgatgccggcgccggagcccgtcggattgtagttgatcgtggtgccggaaagctcggtgtaaacctcctgataaatgccgatcagcttttccatcgaggtggagccgtccgtcgaaaccgagccgccgaggttcgaaaccgccgtgcccgaagacgcggaggaatcgtcgctggaatcggaggaagccgacgacgcggacgcggaggacgtggaggactcggaggaggagccgctcgtcgtattgccgccgcaggccgtcagagccgttacggccagaagcgcagaggccgcgagcgcgagaattttctttgccttcataagtaatctttcctttcaggtctttgttttctttcctgtttacgggctaaagtatagatttcgtttgtaaagttcaaaaggcggcgtgcgtaaaatccatgtaaaatcactttacatagaaaagtatttgaaattatgcggcaaatgctgtaaaatgaagcaaagcgcgccgcggcttttctgcggcgcgcacatattttccatgttaaattataagaataagaggaggcgccatgaaaatgcgcagtgaaaaggaaatgtacgacctgattctcggctatgcccgggcgcgtgccgacatccgcgccgtgatcctgaacggctcgcgcgcgaacccgaaccgggtgcccgacccgttcaacgatttcgacatcgtctacctcgtgcgcgacctcacgccgtacaagaccgcgccggtttacaaggatttcggcgagctgctcgtctacgagcgcaccgacgaaaacgagctgtttcacgaggcctaccccgaatacgtctgctacctcatgcagtttgcagacggcagccgcattgacctgacgatcgccgagaccgaccgctggcgcggctactgctgcgacgaccggctctcggtcgtcctgctcgacaaggacggcctgatcccgccgctgcccgcgcccgacgaaagcagccattatatagaaaggccgaccgcgcagaccttcttcgagtgccgcaccgaattttggtgggtcgcgccctacgtctcaaagggcctgtggcgcgggcagcttttgttcgcacaggcgcacatggaaagctgcatccgcaaaatgctgctgcaaatgctcaagtggtatgcgggcgcactgcatggcttcgaccgcacggccggcaaatgcggcgacaatctcgagcgccttctgcccgcgccggtctgggcgggctacctcgagacgttcgcgcgctgcgacgcggcggacatctggcgcgcgctctttcaggccggcgcgctgttcaccgagatttcaaagcttacggccgaggcgctgggcttcacgattgaggacgaatacgaccgccgcgtgacggcctttctccagtacacgcacgacctgccgcgcggcgcggaaacgctcgatttcactgtggactgagccggcgcgccccgcaaaggaaacaaccgtctatataaatagaaaggaaaacactatgcagatcttatgtatcggcgacgtcgtcggtagccgcggctgcaatttcctgcggcgcacgctgcccgccctgcggcgcacgaaaggcatcgacgtcgtgatcgcaaacggcgaaaattcagcggacggcaacggcatcacgccggcctcggccgggcacctgttcgacagcggcgtcgatgtgatcaccgccggcaaccacaccttccgccgccgcgaaatgtacgattaccttgacgagaacgaggccgtcgtgcgcccggcgaatttcccgcccgaaacgcccgggcgcggccttgcggtgctcgacctcgggcgcgcgcgcattgcggtcatcaacctgatgggcgccgtgtacctcgacgagcacctcgcctgcccgttccgcacgctcgacgcactcttaaaaacgcccggcctgccgaagatctgcatcgtggatttccacgcggaggccaccggcgaaaagcgcgcgttcggctattacgcggacggccgcgtctccgccgtgttcggcacgcacacgcatgtgcagaccgccgacgaaaccgtgctgccccacggcaccggctatatcaccgacgcgggcatgaccgggccgatcgaatcggtgctcggcgtgaagccggagcttgtcatcaaaaagcagctccagaagatgcccgtgcgcttcgattttgccgacggcgcctgcaaaatggactgcgtgctcttcgacatcgacgaaaaaaccgggctgtgccgcggcgcggagcggctttcgatccgctgagaagaaataaattccgcaaattcagggcactttccgcgtcttaacttgtaatttccgaacgagtatgctatacttggctttaagaatatccggttggcggcactttttgcgccccgcaaaataaacagacaggatgtgtatgctgtgattactggaaagcagcttcgcgacgccgtgatctcgggcgcgaacagtatattgaaaaaccgaaagtatgtggatgatctcaacatcttccctgtgcccgacggcgatacgggcacgaatatgtccatgacgatcggcgcgggcagcgaagcgatggaggccctcggcgacggggagacgaccgccgcggtcgcaaaggcggcggcttccgcgatgctgcgcggcgcgcgcggcaactccggcgtcatcctctccctgctgttccgcggcttctcgaagggcctcgagaacaccgagaccgccgacggcgcccagctcgctgaggcgctcgccatcggcgtggacgcggcgtataaggccgtgatgaagcccaccgagggcacgatcctcaccgtcgcgcgcgtcgcggcggaaaagggcgcggcggcggccgagatcgaccgcgaccccgtctatgtgtgggacgcgatctgcctcggcgcggcggaggcgctctccaccacgcccgagcttctgcccgtgctcaagaaggccggcgtcgtcgatgcgggcggtcagggcctgtgcatgatcctcgacggcatgatgcgcgttttcaaatacggcgagatcatcgagctcgagatgagcgcggaggaaaaggccgaggagaccgccgagttcttccgcagcgtcgcggcagaattcgacagcgagatcaacttcacctactgcaccgaattcatcgtcgggcgcgacccggagatcacagccgacccgaacgagctgcgcctcttcctcgagacgatcggcgactgcgtcgtcgtcgtggacgacgaggagatcatcaaggtgcacgtgcacaccgagcagccgggcgacgcgctcacccgcgcgctgcaatttggttcgctgctcaccgtgaagatcgaaaacatgaaggagcagcacagaaaggccgcggagcagaacgagaaaaaccgcgccgcctttgaaaacaaggccgaagcgccgcagaagcccgcgctcgagcccgcggagccgaccgaggaaatcggcttcgtctccgtcgcggcgggcgacggcctcaaggttctgttcaccgacctcggctgcacgcaggttgtcagcggcggccagaccatgaacccgagcaccgaggacatcgtcgaggccgtgctcgccacgccggccaagcacgtctttgtgctgccgaacaacaagaacatcatcctcgcggccgagcaggccgtgccgctcgtcaccgaccgcgagatcaccgtcatccccacaaaaacgattccgcagggcctctccgcgatgctcgcctttgaccccgacgcggcggcttccgaaaacgccgacgcgatgatgatggcggccgagggcgtgagcaccggcaccgtcacctttgcggcgcgcgattccgaattcggcggcttcaagatcaaggaaggcgacacgatgggcctgacgaacggcaagctcgaattcgtcggcgacacgccggtgcgcgcggcctacaaggtcgcgaaggcgctgatgagcaagcacacctcgtttatcacgctgatctacggcgagggcgtttccgaggaggaggcgaacgaggcgatgcgcctgatccgcaacaaggcgggcgacgacgtggaaatcagcctcgttgacggcggccagccggtctactacttcatcctctccgtcgaataagcgggcggcattttcaacgcagctctgggcggggcctcggccctgcccttttcatcttttcccgaaaggcggcggcagcatgccctctctctttgaaaaggatatttccacgctgaagggcgtcggcccaaagcgcgcggcgctgtttcaaaagctcggcgcaccgacggtcggcgaccttttgcggctgtacccgcgcgcctacgaggattggcgcgacacggtgccgatccgctccacgctcctgaacgaggtgaacatcgtgaaagccaccgtgctgcgcaggccggtcgagcagcgcatccgcggcggcatgacgctctacaaaacgacggtcaccgacggcgccgacgacatgcagctcacctttttcaacaaccgctacgtgatgaacctgctcgaggagggcgcggtctacgcctttcgcggcaaggtgacgggcaccttcacgcgccgcgagatggcctcgcccgaattcgtgcccgaaagccgcatgcaggacatggtgcccatctacccgcagaccgagggcctcacctcgcggatcatcgccggcgcaatgcgcgaggcactgcggctgctgccggaaaccgtcaacgacccgctgccggacgcgctgcggctcgagcacgcgctgtgccggctcgaatacgcgctcaagacgatccacttcccaaactcgcccgaggcgctttccacggcgcggcgcaggctggttttcgaggagctgctcgtcctgcagctcggcatgctggagctgcgccgggcgggcgcgcgggaaaacccgtaccccctgcgcgagaatcacaccgccgcgttctgcgcgctgctcccattttcgctgaccggcgcgcagcagcgggccatcggcgacgcaatgcgcgacatgcagggcgcgcacccgatgaaccggctgattcagggcgacgtgggcagcggcaaaacggccgtcgcggcggcgctgtgctacagcgtgatccgaaacggcatgcaggccgcgctgatggccccgaccgagatcctcgccgcgcagcatttcgaatcgctctccgcgctgcttgcgccctgcggcatccgcgcggcgctcatcaccggcagcatgcggcagaaagcgcggcgcgaggcgctcgagggactgaaaagcggcggggtgcagcttgcggtcggcacgcacgcgctgctgagcgagggcgtggaattccagcggctcgcgctcgtcatcaccgacgagcagcaccgcttcggcgtgggacagcgcacggcgctcgccaaaaagggcggcttcccgcacacgctcgtcatgagcgccacgccgatcccgcgcacgctcgcgctgatgatttacggcgacctcgacgtctccgtgctcgacgagctgccccccggccgccagccagtcgagacctacctgatcgacccggcgaagcgccgccgggcgttcggctacatccaaaagcacatcgacgcgggccggcaggcgtacatcgtctgcccgctcatcgaggaaaacgaaagcgatatggcgagcgtctcggcctatgccgagattgtgcgcggctatttcggcgatatgcccgtcggcattctgcacgggcggatgaagccgaaggaaaaggacgccgtgatggccgatttctccgcgggccgcacgaagctgctgctttcgacgacggtcgtcgaggtcggcgtcgatgtgccgaacgcggtgattatgatgatcgaaaacgccgagcggtacggcctctcccagctccaccagcttcgcgggcgcgtggggcgcgggcagcacaaatcgacctgcatcctcgtcaccgacgcgcagaacgaggaggccgtggagcgcctgcggatgttctgcaagacgacggacggtttcaaggtggcagacgaggacctgcgcctgcgcggccccggcgatttctttggcgagcgccagcacggcctgccgaagctgaagatcgccgacatgatgaacgacatgcaggtgctgcgcgaggcgcaggactgcgcgcgcggccttttggagcgcgaccccgcgctggatgaccccgccctgcgcggcctgcgcgccgagatgcgccgcctgttcgccgcgagcggcggcaccgtgacgctgtagccgcgaaaccgcgccgcgtctccccgcgcatggtttgcggcttaccgccggccgcgccgcttccataaaacagaaaaagcccgccgcagccggttcaaacggtatgcggcgggcttttttatgcgttcacttgtcctttttgaaatactcgacgcccatgactgcaagcccaatcacgaggaacaaaacagccagaatgagcggcaatgtcatgccggtctcagcgactgtcgtcagaaaacgccccggcggcgtaaaccactcggaagccggattgcgctccacaaacacgagaaccgcaagcccccagatggtgccgagcagcgcgaggaacccgccgatcaaagctcttttcattttgctttcccctcatttcataatcaaatcgcggtcctcgggcagacggacgggcagcgcggcgggcgccgtcagataccagtatgccgccgaggtgtagtcgtcgtagcgcgggcccgtccagccgaggttgtcgatcgtcatgcggaagtccgtttcaaaccacacggggtctttgacgtgccagcggtagagcatgaagcgcttctgctggttgtacatcgcatcggtatcgccaagaatcgcatacagcccggcgtacagaccgctgaatgtctggtagcggttcagaataatgtcgttgccgaacgcataggagccgcagaaataatcctcggtacccgtgtagttcatcgtcgggtaccggtcgccgtcgatgtacatcttcgcctctccctcgacccagcaggtgttatggccgttcatgccggccgaaaggctcatgcccacaaagcagcctttgccgcgtatgccgtcgataaccgtatacgaccgccccttctgcaccggatgttcctgccggtaggcggcgtgaaagtagccgctgtcggccggaatctccccatgccagccggaaatcatgtagtaaagcgtctgcggctcgccgccgcggttttccatcgtgatgcggcagtgcttccgaaacggcatttcccaataacagttgtagccgcggccgggcgcaaccagcaccatcgcggaattcagcaccggatagcggccgtcacggtcggcgaagttttcgtcgtatgcgcagccaaagaacgccgagaccggcgcctcgactgacggcgcttcaaggtcatcccaataaacgcgcagcacaaaggaatggccgatgtagccggtaaaccagatgtgcgtaatcatgcccgggccgtccgtgtcgcagagcacggcggtttcacccggctgaatctggatgcacgggcgcagcttttcgcagtctccgccgcgcgtgccgccgcttttttcccccgttgggttctcggccgaaaagccgaaagtccgtctgttctgcattctgtaaagttccatctcgtttcctcccttattctgcggttttatatcaccgatttttgcagcgcttccaagatacgcggcagggcggcgcggccctcgcgcaggccctcgtcgtgcagcgcgagcagcgccgggacgtcggcgcttgtgcggccgacgcgcagcggctcgagcggccggatgatcgccgcccggccctctctttccagccgctcgcacagcgcgagctggcggttgtagatctcgtggcggcggcgcatcgcctccgccaccgcggggtacttgcggaacacggccttcaaaaggcccgcgtacccgagcggctcctttttgtagccggcgttgcgcgtcaggacgacgacgtgaaagcggttgccgtccgcgacggatttctcgatcgggatcgggtctgtcgtgccgccgtcgagcaaatcgtatcccttgaagtgctgcaccttcgtgagcaccggcaccgagcacgaggcgacggtcgccgaaaacggcggctcgatctcctccttttcaaaccagacggttctgccgtccgcgcagttcatagcgccggtcagaaagcgcgtctcctgcgcgttgaacgccgcccagtcgaagcggatgtgctgctccggcaccgtcttaaagatatagtcgaagccgaacatcgagcccttcagcagattgcgccggctcacgtatgcggggttgcccacatggtgctcgatgatctggcgcgagcgcatcgcctgccccgagatgtaggaaagcgcgttcgcggcgccggccgaaacgccgatgatgtacggaaaaagcatgtccctctcgagaaaggcctccatcacgcccgcgctgtaatacccgcgcaggccaccgccctcgaggacgagcgccgtgcccgccggcagcgtgtttttcagctttctgccgggaatcggcgtctgtgtatacggcatgcgtatgccccctctttcatttttctaaagcataccgcacattcccggcaaagtcaaggagcgcgcaccgcagccggcacgcgctcccctattttttgttttattctgcggccgccgccagaagcgcctcgcgcgcctccgaaagcgccgcgggggcccagtcctcgcagagcgcgaacaccgccctgtgcagggcgagcagcgcgctttcccgcgccgtgccggcctgcacgccgcctagcagggcgggcgccgcagtgcggatcgccgcaagaagcgccgccttctccgcgcgcaccggcccccgcgcgctccaagcggcctgcatgtcgccgtccgccgtgctgccgcagggcattgcgcagcgcgcgcagtccggcacgatgcggttcttttccgcgtgcgccgcctctgccgcagcacgctgctctgcctccggcgcgccgagcgcgcacaggccgcgcagcagaaccgcgtcggtctccggcgtttttccctgcttcgaggccgcgcgcaccagcccgacgagcgcgctgagcagcgcgtctccccgtttatccacggtcattttccttagggaaaacgacggtcagcagcattttgaacgcctcctcggcgtagaccgcatgcggcttcttcgccggcatgacgagcgcctcgccggcctttacgatgtgcgccgtgccgtccacggtgaagcggccggcgccctcgagcaccgtgaccatcgcgtcgccggtggaatcgtgcgtgccgatctcctcgcccttgtcgaacgcaaagagcgtcacgctgaccgcgctgttctgcgcgagcgtcttgctgacgacctgccccggctgcacagcgacctccgccgcgagcggcagcaccgtttcgtgcgggatatttttgatgaatgccattttgctccctcttctctcttttattttcagccgacgatgcggccgtcggtcgagataacgcggacctgccacgggatgaacttgccgctcgccttgagcgcgttcaccgcggcgcgctcgaggccgccgcagcacggcacctgcatgcgcacgatggtaacgcttttcacgtcgttctgccggatgatctcggtcagcttttcggtgtaatcgccctcgtcgagcttcgggcagccgatcagcgtgatgcgcccgcggatgaattcgcggtggaaatcgccgtaggcgtacgccgtgcagtctgccgcgatcagaagatccgcgccgtcgaaatacggtgcgcgcaccggcacgagcttgatctgcaccggccactgtgagagcgccgacgcggccggggcggcctccgcctgcaccgccgcgcgctcgatcgcctgtgcgcggctgccgggacatccgcccgcgtgcgccgccggacggagcgtctccgcacggctgcccgggcagcccgccggggcctgtgccgcctgcttcgcacgcttattctgctccacggcctcctcgtcatacgccgcggcctcgcgctccacaaaggcgatcgcgccggtcgggcaggcgggcaggcagttgccgaggccgtcgcagtaatcgtcgcggatcagctttgccttgccgttcaccatcgcgatggcctcctcctgacatgcgttcgcgcacaggccgcagccgttgcacttttcctcgtcgatctggatgattttgcggatcatattgcatcgtcctttcggtttcgaatttcatttgtgtattgactttgtgccctgagtatactacgatggaagcggaaagtatgttgttaaaacaacaaaatcaaatttttttgccgtgggtactctgcgccggggcttttgtgccccacccaagcgcggcgcgccgcccgcggcacggaggcaatgcgatggatctggactttttaacacaaacgcagcttttcagggacatcccggccggtgagctcggcgggctgctcggctgcctcagagccgtgcggcggcagtacaaaaagggcgcgatgctctgccgcgccggcgaccgcaccgagtcgatcgggctcgtcctctcgggcagcgtgcacatcgagagcgacgacgcatggggcagcaagagcattttgaacagcgtggggccggggcaggttttcgcggagacgtacgcctgcgtgccggatgagccgctgatggtgaacgtcgtcgcggcagaggatacggcggcgcttttcctgcacgcgccgcacctgcttgcgccctgcacgcaggcctgcgcctgccacgcgcagctcatccgcaaccttctgttcgtcagcgcgcagaagaatctcgcgctttcccggcgcatcttccacaccgcgccgaaaacgatccgcggccgcctgctctcctacctctcgatgcaggcgatccgcgcgggcggcgacagcttttcgatcccgttcaaccgccagcagctcgccgattacctcggcgtggaccgcagcgcgctttccgcggagctcggccgcatgcgccgcgagggtctgctggacgttcggaaaaaccgcttcaccctgcgccgcacaaggccggagtaaagcggcgcacggctcccgcatcgcggttcgggcgatacaaggcccggcggccaaaaatatctccgttaaaaaccgccggaagctcggttcaaacgcacagcgcctacacggatcgagtcccggcggtttacagccgcatttttcctatatcttcaatatcggtgaatttttcgctcggcgcctggaacacgcgcgcggcctccttcgataagctcacccgcgccgccgtgcacaccgaccgcacgcacctcctcgcctttgaggagacgacgatccggcggcgcgagccggacggcgacctgccccggcagctcggctgcggctttgaaatcctcgtcgccgcctaataatccataaaagccgccgtgcccaaaagcgccgcgcctgcggctttttgcgtgccgggcattcccattccccgcccgggacttcaaacggctggagcattgagaacttcccccgccgcgcgtcccccctctccccgccttggattgcatccgcggctagatcccctccgccgccggcactcgcggcgcacctgcggcgtaggacgtacaaagtccgaatttcatgcgagttgcatagtttcttaatttgactgctttttgactacctgataaagcaaaatcgtgccgaaagcaacggaatccgaaaaaagaaaagcccagtgcaaaagccaaaaaacggcttaaacactgggtctttcttggagctgctaaccagattcgaactggtgacctcgtccttaccaaggacgtgctctgcctactgagccatagcagcaaaccaaaagggcaagcgtggcttaccctcttgtggcgacccggaacgggctcgaaccgtcgacctctagcgtgacaggctagcgttctaaccaactgaactaccgggccaaatggcaggggcagtaagattcgaactcacggcacgcggttttggagaccgctgctctaccaactgagctatgcccctatttgccggccatctctgaccgctcgattattttaccattctgcgcgaaaaatgtcaaggcttttttataaaatattgcgcgcgaattccgcgcggaccatgcgccgcagaaatgccgtgcaaacaaaaggcccgccgcggcatgcggcaggcttctgttcgttttaccgcgctcagcgggagaggctctgggagatctcgtagagcttttcgtcgaacacgcggggcatgttcagcgcctcggtgatatcaaaatccgtgatgcgctcgccctgcatgacgacgacacggttgctcttgccgtcgcggagcagctcgaccgcatggtaacccatctggctgccgacaacgcggtcgcggagcgtcggggagccgccgcgctgcacatggccgagaatcgtcgcgcggctctcgataccggtggcctcttggatgcgcttgcagatctcctccgtcttgccgacgccctcggcgacgacgacgatgaagtggcgcttgccggtctgctgcgcgaacttgatgcgctcgatcaaatccttttcaaaatcgatctctacctcgggcacaagcgtcgcgatcgcgccgacggcgatgccggtgttcagcgcgatgtcgccgcagcggcggcccatgacctcgacgacgctgcagcggtcgtgcgattccgtcgtgtcgcggatgcggtcgatcatgtccatcgcggtgttcatggccgtatcgtagccgatcgtatactcggaactggaaatatcgttgtcgatggtgcccggcacgccgatgcaggggatgcctgcgttcgaaaggtcgcgcgcaccgcggaacgagccgtcgccgccgatgacgacgacgccgtcgatgcccatctcgcggcagtttgccgccgccttatccacgccttcctgcgtgttgaattcgggactgcgcgccgtgaacagcgaggtaccgccgtgctggatgatattggaaacgctgcgcaggtacattctctctacctcgccgtgcagaagaccgttatagccgcgcttgacgccatacacctccataccgaaagagatcgcggtccgaaccactgcacgaaccgcagcgttcatacccggcgcgtcaccgccgctcgtcaatactgcgattttctttgcacacattttcgattcctccatttttatataaatgcaaaagacaattacccatttacatttcattatagtctattccaccgccagaatcaagaggaaaaaccacgttttcgggcggaatttgcgctcacttttccttcagtgccacattgccctcgccgagcagccgcttgagcgccgcgaccagctcgtaattcaccgccacgcggtatttcgccggcgcgcgcacgagcttctgccggtcgagcgcgtagaggtagaggtcggtcacaccgtcgaaaacctcgatatattgcagcgcctttttgcagagcgggtcgtccatcgagggcacgcgcaggtaaagcccgcggtatgccgtgttgtagccgcggatctgcacgcccgggccgccgcccgcaccgcctgcgccgggcgcccctgccccgccgcgcgcgccctgcgccagcatcgcctcgggcgaatacggcgccgtgaaatactcgcacacgagcttcgggtccttctcctcggtgaagctgatgcgcccgtgcgccttgaccgcgctgcccggcacgagcaggtcggcgctgcgctcgagcaccttcgggaacacgagcgcctccattgagccgtaaatatcctcgagcgtgagaaacgccatgttcgcgccggatttcgtcaccttgcgctttatatccgagacgatcgccagcacgtcgacgtactgctcgtcgctgtacttatccgattcgcccgcggcgctctgcgcgatctcatccgtgcgggccacgaggtcgcgccggtacacctccgcgtacggcgccatcgggtggccggagaggtacatgccggtgacctccttctccatcgcgagcagctcggcctgcgggaattcctcggcgcgcggcatctggtacgtctcctcctgctcggcgccgccgaggtcgaaaaagccgatctgcccctctatgttcttccgcttgtcggaatcgaggctttcgagcaccggccccacggcgagcagcatctcgcggcggttgctgccgagcccgtcgaacgcgccgcagcgcacaaggctttccaccgcgcggcggttcaggtcccgcccctgcatgcgcttgcagaaatcgtagaagctgcggaatttcccgccgcgcccgcgctcgagcagcatgcgctggatgacgccgcggccgagatttttgaccgcgagcaggccgaagcggatactctcctcggagacggaaaagccggtttcgctctcgttgacgtgcggcggcagcaccgggatgccgatgcgcgcgcattcctccatataggccgccaccttgccggagaagccgagcacgctcgtaagcagcgcggccatatactccttcgggtagtagtgcttgaggtacgcggtgcggtacgcaacaaccgcatacgccgccgcgtgcgatttgttgaacgcataggaggcgaagctctccatctcgtcgtagatgatctcggcggtgcgctcatcgacgccgcgcgccacgcagccctcgatttcgacggtgccgtccgcgcgctttaggccgtggacgaaatacttgcgctcctcctccatgaccttgtgcttcttcttgctcatcgcgcggcgcacgatgtccgcgcggccgagcgaatagcccgcaagctcgcggaaaatgcgcatgacctgctcctgataaatgatgcagccgtacgtcacgtcgaggatcttcgagagccgcgggtgccggtacgtgatcttctccggatgcctgcggttttcgatgtaagaggggatgaacttcatcgggccggggcggtacagcgagatgacggcgatcagatcctcgatgctctccggctcagactgcatgatgacgcgccgcatgcccgccgattcgaactggaacacgccctccgtcgcgccgctcgtaatcatctggaaaaccttcgggtcgtcgtccggcgcgttttccacggaaaagcccggcgtgtgccggccgatcatctgctccgcgtggtcgatgaccgagaggttccgcaggccgaggaagtccattttaagcaggccgagctcctcgatggccgtcatcgtgaactgcgtgacgaccgattcgtcgttcatgctcagcggcacgtaatcgacgaccgggcggtccgtgatgacgacgccggccgcatgggtcgaggtgtggcgcggcatgccctcgatcttccgcgccatgtcgatcagctcgcgcacctgctcgtccgcctcatacttgtcgcgcagctcggtcacgctctcgagcgcgtggtcaagcgtcatgttcagctccatcggcacgagcttcgcgaccatatcgcagacgttgtacgggatcgccatcgcgcggccgacatcgcggatcgcgaggcgcgcggccatcgtgccgaacgtgacgatctgcgccacgtggtcggcgccgtacttatcgacgacgtattcgatgatctcctgccggcgctcgtcgctgaaatcgacgtcgaaatccggcatgctgacgcgctcggggttcaaaaagcgctcgaaaagcaggtcgtagcgcagcgggtccacacccgtgatgccgatgcagtacgcggcaaggctgccgacgcccgagcctctgcccgggccgaccgggatgcccatgctcttcgcctgccggatgaagtcgtagacgatcaggtagtagtttacataacccattgtatcgatcgtcgaaatctcgtactcgagccgctccagaatggccgggtccgggtgctcgccgtagtggcggtgcagcccctccatgcacaggcggcggaagtaatcgcggttgtcgctgccgtccggcgtgtcgaaccgcggcagcttcgtgtggccgaattcgaactcgaggttgcactggtcggcgatcacctgcgtgttgtcggccgcctcggggcagtccggaaacagcgcgcgcatctcttcctcgctcttgaaataaaattcgtccgagccgaattcgagcacgtcctcgtcctcgatcgtgcggttcgtctggatgcagatgaggatgtggtgcatcttcgtgtcgtctttttcgatatagtggcagtcgttcgtgacgacgagcgggatgcccgtctcgcgcgagagccggatgagctgcgggttgacataagcctgatccttgaggccgtggtcctgcaattcaaggtaaaaattgccctcgccgaaaatatcgaggtagcgcgcggcggcctccttggccgcatcgtatgcgccggcggcgagcgcgcgcgggatctcgcccgcaaggcaggccgaaagcgcgatcaggccctcgctgtgctttttcaaaaggtcgaaatcggcgcggggcttgttgtaaaagccgtccgtccacgccttcgagacgatcgccacaaggttgcggtagccggtttcgttcttgcacagcagcacgaggtggcggttttcgttgtcgataccgtgcaccttgtcggtgaggccgcgctttgcgacgtagatctcgcagccgatgatcggcttgatgccgcgcgccttcgccgccttataaaaatcgatgacgccgtacatgacgccgtgatcggtaatcgcaacgctcgtctggcccatttccttcgccttgtcgagcagccgctcgatgcggcacgcgccgtcgagcaggctgtattccgtgtgcagatgcagatgtgtgaacgccatggtatcgccgcccttctaaaagctgtttttcactgtttttcgccgttttccgcgcgctgggccgcggcctcggcctccggcgtgccgagcgcctcggcaaactccagaatgcgccgcagccggtggttgacgcccgaccggctgatcgagagccggccgctcatctcgcgcagcgacatttcggggttgtgcagccgcagaagcgccgcctcgcgcagatcctcgggcagcgcgtccagccccattttatcgctgatcagcgcgatcgccgcgatctgccgcgacgctgcggaatacgttttgtcgaggttcgccgtctcgcagttcgagacgcggttgagattgttgtacgtctccttgtacatcttgatctgcatcagcgccatagcggcgttgaccgcgccggtcagcgtgaggaaatcctcgatcgcgccgctctccttgatgtagaccatgtagccgtttttgcgccgggccaccgccggcgtgagctgcgccgcacgcacgccctgcagaagggccgcgaggtcctcggcaagatgcaggtgcggcgtggaaaactcgaggtgatactccttgttcgggtcggtgaccgtgccgcagacgaggaaaacgccgcgcagaaatgcggcggtgcagccatcgtccgcgagattttccgcacggatgcgcaggctcgcttcgccgcccgtgtggccgaacgactcgatcatctgccgccgcgccgcctcgtcggggatcgcgatcgaaaacgcgccggcgcttttgcggcgctgctgcgggcgcacctcggcgtacacgcccgccgaaacggccgcggcctccgccaaacggtgcgcgacggccgcgttttcgcagatcatatgcgtctcgcgcggcgaaaagcacttcgaaaaaagcagaaggccgtagcattctgctttgagacagcacgatcgcctattttctattttgcaaagctcggccttgcagtccgatgcaaaggacatggcgcattctcccctctgcgctttaattcttggtgatgtcgcggtgcgtgacgctcgcgcgcacgcccttttccgcgaggtggtcgtgcatgtactgcgccagcgcgaccgagcggtggtggccgcccgtgcagcccaccgcaatgacaagctggctcttgccctcgcggatgtagagcggcagcatatagtcgatcatatcggtgaagcgggctttaaagccctccgtctccttcgactgcatcacatagtcgcgcaccggggcgtccagcccggtcttatggcgcagctcctcgatatagaacgggttcggcaggcagcgcacgtcgaacacgaggtccgattcgagcggcagaccatatttgaagccgaagctgacgcagtgcaccgagatcgcgtcgctgtcgtttttgaggaacaggctcgagatccgcgccttgaggcgcgcggccgggtagttcgaggtatcgaccacatagtccgaaacctcgcgcacggggcgcagcatatcgcgctcgaggcgcacggcctgctcgagcgagccctgcatcgtttcggcaagcgggtgcttgcggcgcgtttcctgaaagcggttgacgagcaccgcgtccgacgcgtcgagaaacaagatcttatacggctgattctgcgccttcaaggtttcgagcgccttgaaaaacgacttgaacagctcgccgccgcgggtatccgtcacgacggcgatgcgccgctggataccctcggatttatcgcacaaatcatagaacaccgggatcagcgccggcggcaggttatcgacgcagtaaaagccgatgtcctccatcgcgtgcatcgcgcgcgtcttgcccgcgccggaaagcccggtcacaatcacaaattccatttttcgctccttttcctttccgcggggccgcccgccggctccatattttgcccggccctcagagccggatgcgccgaacctccggctcgagctgcacgcccgtttcgcgcagcaccgtttcctgaatgtgcgcgatcagcctttcgacgtccgcgcaggtcgccccgccgcagttcacgatgaagcccgcgtgcttttcgctgacgcacgcgccgccgattctgaaacccttgaggccgcagttctcgatcagcgtgccggcaaagtgcccctccgggcgcttgaaaacgctgccggcgctcggcagctccaccggctgcttcgatttgcggcgctgcatgaggtcgtccatcttcgccgtgatttccgcctctgcgccgtgcgcgaggcacagctccgctttcgtgatcacgcgccttgtgttcgtgaacgcgctcgtgcggtagccaaagcgcagcccctcgccggaaagcgaggctggcgtgccgtcctcctccacaaaccagacacgcgaaacggcctgcttcatctcgccgccgtaggcgcccgcgttcatgtagagcgcgccgccgagcgaacccgggatgccccaggcaaattccagcccggtgagcgcgttgtcgcgcgccaaggcgcaggccgcggcgagcgaaaccgcgctgccgcacagcaggcggccgctgcccgaaagctccgccgacttaaactcgcccccgagcgcgagcaccgcgccgcgcaggccctcgtccggcacgagcaggttcgagccgttgccgagcgcgaaatacggcaccgccgccgcgctgagcgccgcaagcgccgccgagagcgaggccgcgtccgcaatgcggagaaagcggtccgccgggccgccgatcttgaagctcgtgtgcgcgctcatgcgctcatcccttagaaaggggatccccgcccgcgttagggcggcgtccaaaacggcataatcaggcattctccatactccttaaaatcgcatccgcgttttttctgttttgcaggatattcgtgtgccgccgcaggtaatcgagcaggcggcccttatcggcgttgaggatcagcgcctcggggaattcgatctccgcgagcatctcaagcgccggcgcgtggtccttcacgctcgtctcaaagtgcgcgtcggagctgacgacgatcggcacgccgtactttttgcagcacagcgcgatctcgcggcagcaggggatgttcgccgggcgcgcctcaaacgagtgcgcgttgatctcgacgagcttgtggcaccggccgaattccgggatcaccgtatcgtaatcgtagcggtattcggggctgccgctgtggccgatgacgttgacgaccgggtcgtgcgcgatgttcagccaaagctgcgtgcacttttcggccgtcggattttcaaggcccttcagcccgatgttgtgtatcgacgcgaccacccagtccatgcggcggcgctcctcgtcgatgatgtcgagcgcgcccgaaaaatcgagcacgttcgcctccatgccggcgagcagcagcacgcccttgtagagcagcggcagctcacgcagggcggtaaaaaaccacgggccgggcgcgccgggcatcgtgcgcgcgtggtcggtcagcgcgagggcgaaaaggcccttctcccgcgccgaaaccgccatctcctgcacggtgctgtaggcgtgcgtggaggccagcgtatgcgtatgcagatctgcaatgatattatacataaaactatcccttttaaaatcagatgtcgagctcgcgcttgatctcctcgtgcggcatcatcgaggcgtccatgccgagcgccgagagcagctcgtgcgcggcgttgtagcccatctttttctggcggttgttcatcgccgcgacctcgatgatgatcgcgaggttgcgcccgggcttgaccgggatcgtcatcaccggcacgcggatgccgaggatctcggcgtactcgctgtcgatgcccatgcggtcgtagaccttcgtcgcgtcccagatctcgaggttgatgcacatgtcgatcttttcggagagcttgacggcgcccataccgaagatgcggcgggcgttgatgatgccgatgccgcgcagctcgatgaagtggcggatattctcgggcgactggccgacgagcgatttgctcgagacgcggcggatctccaccgcgtcgtccgcgatcagccggtggccgcgcttgatgagctcgatcgccgtctcgctcttgccgacgccgctgtcgccgacgagcagaatgccctcgccgtagacctcgacgagcacgccgtggcgcgtgatgcgcggcgcaagctcgacgttcaggtacgcgacgagcgaggccacgatgttcgaggtagactccgtcgtgcgcagaatcggcaccgcgtagcggctcgcgagcgcgcgcatctccgcgctcggctcgatgccgcgagcgaagatgacggccggcggctgctgggaaaagtagctttcgagcgcgatgctgcgcttatcggtgcgccagctctgcaccatcgcgatctccgcgcggcccacgaccgcgatgcgcgtggggtcgaaatattcgaggtagccgctcagctccatgcccggccgcacgacatcgcgcgactggatgaggatgtcgtcggcgcttctcggcagataggtcgcctcaagctgcagctcgtgaatgatttttgaaagcggcaaggtgtacgtttcaggcattgccataaccatcctttcagggacgaaaccgtttttccgttcttttgggccgggtgcgccgcggcccggcggctcagccgccttttgtattattatagcggatcgcacgttaaaaatcaaccgaatgccggcgttttctgttggagccccgtctttgccgtatgtgtgccccgtgacaggcattcccgcagttggaaattacatctatcaccggcagaagattcaaatctgccaaattcggccgaaaaagacatcatatcttgacaatccaaccgccggactgtagaatatttgtgtacaatccatgtggaattgtttgcaattatgggtggggaacagtccggaaaccgcagctgcggataaaaccggctacaatatgaggaggctgtgggaatggctattgtcgatgttgtaaaatataatgggacaccggatgtattcgcgtggaaatatccgagcgaagaacttggcacatggacacaactgatcgtcaacgaatcacaggaagctatactggtaaagggcggtcaggcgctcgatattttcggtgcggggcgtcacacgcttgaaacacttaacattcctctgctgcggaaggtcattaatctgccttttggcggcagaagtccgttcacagcggagatctggtacatcaataaagcttataacttggatataaaatggggcactccaacgcctgttcaaatcaaagatccccaatatggcattttcgctccggtgcgctccaacggcgcgttcggtattcatattgccgacgcacggaaatttctgatcaaactcgtcgccactatgccgacctttgactccacttctatcacaaaatactttcgaggcctttatgtcacgaaagtcaaagattcgatctcgaattacttggtgcataagcggatcagtattttagaaattaatgcctatctcgacgaactctctcagtatatgaaagagcggattcaacccgtaattgaggaatatgggctagaacttgtctctttttatgtaaacgagatcagtgtgccggaggaagattcggctatcaaacagctgaaagccgcgctttccaaacgcgctgaaatggatattcttggatacagctaccagcaggagcgctcttttgatacgctggagggcgccgcaaaaaataccggcagcacagctgcaccgctgataggcgccggcatgggaatgggtataggtttcggcgcaggcccaaaaatgggcgcggaatttcataccatcgcgcagaggcttcagaccaatggctctgctgaggcggcaaaagaatgcccacattgccacgcccggttgccacaggctcagagattctgcggaaactgtggatgggacacagaaaaagcaccgaagtccgggctgtcagccgatgatcaatctgaaccggcagaaaccccgcagacagtccagcctacctgctctgcttgcggttgcacgatctccgcagaagcgaatttctgccacggctgcggcagaaagctccgccactgtccgcaatgcggaaacgatatgccggacgacgcagccaaatgtgatacctgcggttacgcacggcctaaattatgccccaactgcgggacttccgtaccggaaacggcaaatttttgcccggcctgcggtcaatcaatggtcaagcgctgccctaaatgcaatgcggttgtcaatgacacggaaaacttctgttccatatgcggtgaaaaactatagagggcacagatataatcaggagggaatcatttatcatggaaattccaaaggacggaagatgcgtaaactgcggcgctatgctcgaaaagataccaactaccggcgatattctcactgtctccgggcaatgtgagtgtgcatactgcggtacgacatatcaaatttctgcacaggaatctgtctgtgcggtctctaaaagccttgctcctgagaaggcaatcgctctgagcaaaaaagcagacgtcgcttacagtcaaggtcgatacagcgaagcgatcgggtacttaacggaagcactcgaattcaatccgaatgattattccttgtggaatctgcttgggcgcgcgcaccgtgtatccgggaatcacgacagagcaaggtcgtgttaccagaaggcgctgaatttgaaaccgaacgccaatgacgtcattgcaaatctgggcgcgctcgaacttacctgtcagaactatcaggaagcttatcggcactgcaagcagtcatttgaagcaatttattctccggatgggcataatgtttcagcaaatgaccgcgccgtacgtgcagccaactatgccttgtctatcgctaagatcggcaataaacgggaggctatgcgcgtcgcagaccttgctaagaagcttgggtacaccaattacgccaacctgaaaaagatgattaaagaatcataattgtgaaaaaacaccgcaggcattgcttttcagcaggcctgcggccttttgtttgacgacctccagacggaagcatgccttgctgccgggccggaaaaagccgagggacagcgcggcgccgcccctgcattcaaaaaaatttccgaatccgcttgacagcgtaacaatgttgcgttataatcgggttgtaacaaaacattgttacaacagcttgtacaccgatttgaaaaaggaggtttgcgcgcacggcgcgcggaaaggagacgcagctttgaaaaaagagacgcacgaaaagcgcaccgcgcagaaaggacgggaaacgccatggatctgatctcgaaaaaggagcttttgcagcagaccggcatctcctacgggcagctctaccgctggaagcgcgagaagctgatcccggaggaatggttcatcaagcagtcgtcctacaccgggcaggaaaccttcttcccccgcgagcagattctgccgcgcatcgcggccatcctcgagaacaaggataaatactctttgaccgagctgagccgccggctttcgcccgacgccgccgcccgcgtggacggccgggcgctcgcgcggatcgaggaaatcgcgcaggacctgctccccgcgatcctctacttttacccgaaggaaagctacgacctcttcgacctcgcgctgtttgccgcggtgagccgggcgctcgacacgctcggccttgcgggcgagctgcggcgcgaggccgccgagcgggccgtttcggcctcgactttgcggcagctcgactcggttctgacgctcttcttcgccggcggcggctgccacgcggtgatctcgaaggtcgattccccgctcgtgttcgacagcacgatcaaaaacgcctgcaccgtctcgatttcagaggcggcggccggcatccagatgaaataccgggacctgttcccggccctgtgagaaaagaggcgtgaagcaatgacacagaacattcatatcgacggccgcggcgatttttcgggcggcgaatacaacgcggtttccgtcaacgggctcggccgctgcgcggaggccttcacctgccagagcatcacggtcaacggctcgctgaccgccgggggcatcacgacggaagcgctcggcgtaaacgggcgcttgaaggtgagcggcagcatcgccgccaaaagctcgaatgtagacggcatgacgtccgtcgagggcggcatgcacacggagagcctcgccgtgaacggcaacctgaccgtaaacggcagcctgaacgccggcgacgccagcgtggacgggcggctcaaatgccgcggcgtggcgacggcggcggacttcgactgcgacggcatggcgagccttgaaaagggccttttcgcccgctcggtcgatgtggacggcattttgaccgtcaccggcaacatcgaggcggaaagcatcgaggcggacggcaagatctcctcgacggcgcagatctccgccgatacgatccgcctgcacggcatggtgcgggccgacgagatcgtcggcgacagcatcgagatctgccacaaaagcccggcgggcgttgcggcgggctttttaaacgccctgttcggcagcagcctgcacgacgaaacgcgcaacgcgaacctgatcgaggcgacgacgatccggctcgaggacgtgtgcgccggcgtcgtgagcggcgagcacgtgacgatcggcaaaaactgccggatcgaccggctcgactgcacgggcgatttcaccatcgacccgacgagcaccgtgcgccttttaaacggcgagccatatgcgcccgccgcccaataagcgccgaaaatacgacccatacacgcgaagccgcgggcctgcaaaacgcagcgcccgcggctttttttgtgtcgcgattccggctttccttctatttatgcctcggcggccttgtaaagccccggcttgcagagaatctcgtgcacccgcgtgtcgaaaaggtccgccgtgtaggccggcgtgatgacgcaggccgtatcggccccgcggcctgtaccggcgacgcagacgaccggcgcgccgtactcgacgctgccgcagtcggccgccatcagcgcgcattccacgcagaccttcacgccctgcccgagcatgcgcagcgtgtgcgcgacgagctccaccgggtacacgccgccgaacttgcggctgatgccgcgctccgccccgctgagcgtgtgcgccgcggtgacgatccgcacgccgcgcgcctcgagcgccgcgcgcgtttcggcgggcagcgtgttttcgccgggcttcggaaagccgtccacctgcccgaccatcacgaccggcagcgtttcgcccgccgcttccagcgcgtccaaaagccggaggaccgtgtcgccggtgctcgacgccgcgacgatcgtgcagccccgcgcggccgcggcctccaccgcgatgcgcagcacagcgtccgtgttttccttgcccgctctttcaaaagccaccatgataatcaccattccttattttttgtgcaggtcggcgaagccgattgccgctttgctcgtctcggcaaaggctcaaatcgtgtgtgaaaaagtatttttcacacgaatgcctccttaaatcattctatatgtgttttttatgtttgtatgctatacagtgcataatccgctcagcgcggtatcttatatttattatactatgcggccccgcactgcacaagggaaatttgtagaaaaaagaaaaaaatgccctgcattctgcgccggttcgcaggtgcgggcgatggaaaaagtagggaatatcgttcttatctgctggaaaaattagagaatatcgttcaaaattttccagcatattttcggtatattttcaggcgtttttcacgtgaaaacgcctgtgaaattattatatcacgacaaaaagcaaaagtctactgcattctccggcagagaacgaaaaactctactttttcgcgcacgtttcggtaaagattcccctatcttatagaaagacgaggattgtacatgaggaaaagaaggatctcaaaggcccttgcggttctgctttctgcgctgctgctgtgcggcgcgggcacggccgcattcgcacaggaggcgcctccgggtgccgacacggcggtctcagcctctcctgcgccgcaggacgacagttcaccggtcggcgagccgaccgcttcgagcggcagcgaaacatccggcgcagaggcttccgcatcaggcggcgaaacgtccggcacggctgacggtgaggccgaaagtacgccgagcgccgcgccctccgcagagcccgccgcgccgggcggcgctgcaaatagcggcgaacccgcgggtgcggaaagcgccgcggacttgaacgctgcggacttgaacgctgcggatgagaacgatgcggccgcgctgtccgcacaggccaaggcgacaacctatcagctagacggctggacgtatgagctggacgcagaaaccgccaccgccacgctgaccggcatggtggacaagaaatccgagacgccgcctgccagcaatctgccggaaacctttgttgcagacggcacaacgtacacactgacggcgatttctcactcagattggctcgggctcggcagcggcaacaccagcttgacggaaatcgtcatcccgaaaacagtgacgaccatcagcacttccgccttcagcaatctgaaagggctcaagcggctggagattccggaaactgtcgtcaatatggactcgatctccgtgcagaattgcagcgccttggaggagcttgtgatcaaagcgccgctcaaaagtatcgccaattccgccgcttctggctgcaatgcactgacgacggtcgtcctgccggacaccttggaagcgctcaaacccggtgcgttcggcggatgcggcaagctcaccacggtctccgtctacggcggcgaggccaaagtgggtgctgtccgcctgcccagcacgctgacatccattgaaaacggcgtctttgagggcaccgcggtcaccgaggtcgttttgccggcgggcatcacggaattgcagagctccaccttcaaaaactgcgcaaatttggaatccgtgacgatcgagggcggcggcctgaatgaaatcggcagctacgtgttttctgggtgcgaaaagctcacaaccgtgccggatatgagcgcggtcaccgagattccagccgaggctttttataaatgcaaaaagctcggcctgcccggcacgctgaacatgagcgagatcacatccatcggcagcaaggcattcgcctactgctattgctttgagggcgacctgagcctcgaaagcgcagagaagatcggcatttgggccttcctcagcaccgacatcacaagcgtgacgatcggcgacaaggtggaggatattcccagctatgcgtttgcatggtgcaacagtctcacaagcgtcacgataccgaaaggcatgaaaaccatcggcaacaacgcgttcgacagcgtgccgatcaccgcgatcgaactgccgaacagcctgaccaagatcggggacacggcattcctcgactgcgcaaatttgcagtccgtcaccatcggcagcagcggccagagccggctggacacggtcggcacggacgcgtttaaaaacgcgggcagcgcctcggacggcttgcagattactgtacatacgagccccgatctggttacgggcctcgaaaatttgccggatgcaaccttcaccgtggaggccgtagccgccgcggatgacaagatcagcgatgagccggacgcaccgaccttgcagaaagcgatcgacgatgccgaggacggcggcacggtcacgatttcgaagaatattctgctgatcgagggcatcgagattccggcggataaaaccgtctcgctctgtgcagcggacggcacggccgtgcacatcatcgccgacaaggagaagggcctgcgcggcccgatgttcacggtgccggcaggcagcgcgctcagcctttccggcggcctgaccctttgggggcgcaatatcacgacaggttccaacagcgccgcttttatcgactgtgccggcggcctttcgattcacgagggcgtaacgctgcaatacgccgcggtttcctcatcgttctccgcttccgtccgcatctcgggcgaaagcgccgaatttatgatggacggcggcaccatcagcaacaacagcttctcgacccagtacggcggcatcgttctcgttgaggagggcgcctccttcacgatgaccggcggcgagatctcctgcaacgatacggatatccgcggcaacacgatcaacaacgcgccggtctatgtgctggccccggaaactgccgcgaaatccaccgcctttatcatggcgggcggcctgatcaccgaaaaccacggctcgaacggcggcgttatgctcggcaattcagaatctctgccggagaacgggccgagcgctatcgccaccatgaagatgaccggcggcacgatcagcaacaacagcgccaacaagggcggcggcggtgtcatggtcaacggtgccgcctcctttgagatgcagggcggcctgatcaccggcaactcggccggcaacggcggcggcgtctgtgtctatgacttgtacacctctttcggcggtgacagcagctttgaggaatggaaggccatgtatcccggcgcgttcaccatgaccggcggcacgatcagcaacaacagcgccaacaaggtcggcggcggcatttacgtcgcctccgacaacgtggtgctcgaggccggcgatatttccggcaacaccgcatacaatcagggcggcggcgtgtacgtcggctccgtgccctacacactgcacatgtcgaacacactcatcaccgagaacaccgcttctacgctcggcggcggcatgtggttctgcccgacaggcgacgccgtgctccacgtgacaaacggcgccgcggtctttggcaacaccgcctccgccggcggcgcggacgacgatttcatcgccgtgccggcaaacggccggacgcacacgacaacacttgcggaccgcatgctcggcggcggcgacgtgcagtggtataaggacggcggcgtgtctaacgccatcctgagcggttctgcggtcggcacccccaccgacgacccgcggtacagcgcggatgataccgccgagcgcatcacggggattcaagactacaccatgtccctcgccctgaaagccgttgtgagcgacgcggcggccgagctcgcagagagcaaggcgcagcttcgcatcaccggcaacacggccctgcgcggcggcggcctcggctcgaacggcgcagtcgtcatcggcgaagaggatgaatggacgctgcgcgtcacgaaggattgggccggcggcatcacagacgagcagaaaaagcccgtcaccgtgcggctcaagatcggcgactacgcgctcgacaccgtgacgctcgacgcgagcaaccactggacgaaggaattcatgcagctcccgaatccggagacgctcggcgagctcaagatcaccgtcgtcgaggagggcgaggaatacgacgcgtcgtacagcgagatcacaacggacgagggcaataagctgctcaccgtgaacatcacgaacagcttaaagccgacgccgagcccgtcgccgtcgccttccgtcacaccttctccggtgcccgacaacacaccgtcgccgtctccctctgcaacgcctgcgggaaccccgacgccgacccctatcgtgaccccgacgcccgtgccggacggcacgccgaccccgacccccatcgtgactccgacgcctgcgccggagggcacgcccacacctgcgccggggaacacgccggcaccggaagccacgcccacgccgcagccggaaaagccggaaacggatgcaccgcagaccggcgacgagaccgatctcacaggctgggtactcctcacgatggccggcgcggcctgcctgaccgccgccgtgctcggtgcgcggaggaaagccggccgccggaggtaatcccgcccggcaggcgcagggcctgatttcagcaaaataaaccagcaatgcaagagggaggctctccggcctaagccgggaagcctccctctctctgtatgctttcggcggcgcataccgtgccggaagcctatgaaaatccgcggcgcgcctttacaggtcgcggtatttcttgacgcggcgcatcttgcggcgcttgcggttcatcagcacggcgagcgcaatgtaaaccacgagcagcaccagaatcgcgccggccgtaatcaaaaaccacggcgaggtgatgatctctttgccctgctcgatcgtttggatgatctcgctgcgctcgacgctttcggccgcgacgagcggcacctcggccagaacctcgcccttgtaggtgtaggtcgccgtgccgacctcgtcgcccttcgccaccggcgccttgaccgcgtccggcaggctgagcgtcattttgatgctgctctcgtcgagatccgtcggcagcatcgcggtcacgttgccctttgcaacgacctgaatgcgatccttattccagacatacttgaggtctacctcgccgatcaggtcgccgtccgtgacaatcgtcttgttctcgatgctcgtcagcgcccagcggaacagcgtcgccgcgtcgtacatctcgccgtggtagtcgatgtggttgccgtccgcgtcgaggtacgggctgccgaggcagatgcacaggtagctgtagccgtcgtacgaggcggaggccgcgatgcagtagccggattcattgagcgagccggtcttgatgccggtcgcgtatgtgtaatgctcctccgccgtttcgacgagcatgcgattcgtcgtcgtgacggtgcgcgcctcgctcgtcaggttcgtcggcggctgggtgtagctcgtctgcgaggtgatctccgaaaaatacggcagcgtcagggcaaattcggtgatcgccgccatctcgcgcgcggtcgtgtagtggttctcgtcgtgcaggccgtgcgggttcatgaaatgcgtgttcgtgcagccgagctccgccgccttgcggttcatcagctccacaaagctcatcaggccgtcgccgttttcgtcgtacgcggcgccgtcctccccggccgcgatgttcagcccatcgacgtatttggcgagcgtgagcgccgcgtcgttgcccgagggcaccatcatcaggttcaaaagctcgtagatcgtgaactcctcgccggtctggatctccgcgagcgacgagcccgtgccctcgagctcctcggcgacgctcgccggcaccgtcgtgcgcgtgttcatcaggtcgtccacggtttcgcacgtcacgatatacgtcatgatcttcgtgagcgaggccatcggcagccgctcgtccgggttcatcgtgaacacgaccgtgcccgtatcgaggctcaccataaagatggatttgctgttcggctcggtcagcgtttcgcagacgaagccctcctcgggctgcaccggcgcgggcgtcggcgtcgcctccgccgcgccggacgtttctgtgccggaggcttcctcggccagcgccgcgggcgtcagggccgtcaccgtcaaaagcaccgccatcataagggcggcaaatctaaattttctcactgttcattctccaccagacatgttatactgtatacggggttttccggcgcagggccggaggctcccgtccattgtaccacgatttccgctttctgaaaagagccgccgggcggttttcagaaaaatgtaataatacgggcggcccccggccctgtgccaaacggcgccgcccgaacggcaaaggagggtgatttcccttgaaattcctgcacattgcagacctgcacctcggcaggctgctctacgggcgcagcctcatcgaggaccagcgccatttcctgtttgaatgcctgctgcccgcgatcgaccggcacaaaccggacgtcctcttgatcgccggcgacctctacgaccggccggtcgcccccaccgaagccatcgcgctgtttgacgaactgctcgacgcgctctgcgcgcggcaggtgcccgccgtggtgatctccggcaaccacgacgggccggagcgcatcgcggtcggcgcaaagctgctcgcgcgcttcggcatccacatcgtgacgagcctcgaggccgcctttcggccgatcgagctcggcggcgcgcagatcttcgcgctgccctatttcgataacgccgagatgcgcgcggcgctcggcgacgacacgctgcgcggcgcgggcgcttgcatgcaggcggccatcgaaagaatgcaggcgcagtttttgcccggaaagccgcacgtgctcgtggcgcactgcttcgcggcgggcgcttcgacctcggattccgaatcgcggctgttcgtcggcggcgcgggcgacgtgccgaccgactgcttctcccccttcgactacgccgcgctgggccacctgcacgcggcgcaggcggccggccaaacggcgcgctacgccggctcgccgctcaaatactcggtcgatgaggcgcaccagaaaaagagcatgacgctcgtaacgctcggcgcgggcgcgccgccgcagatcaagctgctgcccgtttctccgctgcgcgacgtaaagcgcctgagcgggagattcgacgacctgctcgccgccggcacggcgcagcccgacgcggactatgtggagatcctgctcgaggacgacgcgcccgtgttctgccccgctgaccgcctcaggccgtactacccgaacctgttgagcgtgcgcagcgcgtggtttttaaaggccggcgccgcggcgccctcggccgccgcgcagagccgcgaccgcaccgcggtgttcaccggctttctgcgcgacatctgcggcggcgagccgcaggagggcgacgaggcgctgtttctcgagatcctgcgcgagctggaagaaaaggaggcctgagcatgcggccgcttacattggagctcgaagcgttcggcccgtatctggaccgaaccgcgctcgactttgaaaaactgaatgaatcgggcctttttctgatctccggttcgacgggcggcggcaagacgacgctgctcgacgcgatgtccatcgcgcttttctgcaaatcgaccggcgggcggcgcagcttttccgacatgcgcagcctgcgcgccgaccacacgcggcgcaccgaggtggcgttcacctttgcgctcggcggcaaagcctaccgcttctgccgtgcgctctacatgaaaaagaagcgcggcacggagatctacgagctgcacgagcaacacgaatgcttctcgatggaggcggacggcggctggaagctcgaggcgagcggcgcggcaaagcgcgtcaccgaatacgcgcagtcgctgctctctttgaccgccgagcagttttcgcaggtcatcgtgctgccgcagggcgagtttttgcgcctgctgcgcgcaagctccaccgacaaggcgaaaatcctcaaaacgctcttcggctgcgagctttgggacgcgctgcccggccggctcaagctgcggttggatcaggtttacagggcgcggcagacctgcgagacgcggatgcggtcgctgctcgagaagcaccgcgccgaaagcccggacgcgctttccgtgcagcttgagacacttgcggcgcagaaaacggcgctcgccgaagcactcgaaacggcgcaggcggagagccgaaaggcgcaggccgcgctcgaccgcgcgaacgaatttgcccggcttcaggccgagctgcaggccgccgaaaaggagcgcgcggcggcgggcacggcactgcaaaaggcccggcgggacgccgccgaggccgaggccgcgggcccggcgatcgaagcgctgcaaaaaacgcgcggcgcgctggagcgccggtttgaggccctgcggcaggagcaggagcagagccggaaaaaacagcggcttcaagcggaaatgcgcgaggcggaaaccggcctgcgccggctcgacggcgacgcgcaggccgccgcgcagaagcagaaggagacgcgcgcgcgcatcgaaaagggcgaagaatacctcgcggaatgcgggcgcgccgccgaagcactgcccggcgtgctcgaggaaaaaagcgcgctggagaaaacgcgcgacagcctgcgcgacctgcacgaggcgcagaaaacacacgatatccggctgaaagcgctcgaggagaaaaacgcccgcgccctcgaaagccggctcgcgctgaccgcgcaggacaaggccgtcgccgccgcggaggccgcgcggagccacggcgccgccgcgctgctcgccgccggcctgctcgacggcgcgccgtgcccggtgtgcggcgccgtgcatcacccgcagcccgccgtgccagccgaggccgtgccctccgaggccgaatttgaagcgctgcgcgctcagcttgaggcgctgcgcacggaataccagagggcggaaagcgaagccgccgccgcaaaggccgccgcagagctcgccggggaaacgctcgccgccgcagccggccgatgcccagcccccgcggccgacgccggggaaatcgagcggcggctcgccgcctgcgccgcgcggctcaccgacctgcaaaagaaaagcggccagcgcgcggcggcgcagaaacggctggatgcgctgcgaaaagaggccgacgcgctcgagcgggacgcgcaggaggccgggcgaagccgtgcggcacaggccgagcggctcgaacagctccgccggcagaccgaggaattccgcgacgtgcgcgacctctcggtgatcgaagccgacggccgcacgctcgaaacggagcggcggcgcgcggcggacgagcaggcgcgccttgaaagcgggcggcgctccgccgcggaagcgctcgccgcggcaagcgccgggcaggagagcgccgaaaagcgtttcagcgccgctgcgacggcgatccagagcttcggagaggccccgcccgccccggccgcagactgcgccgaggccgcggaaaaggtccgcaggcagatcggcgcgctgcacgtcgagctcggccgcacggacgaggcgctcgaatcggcgcggcaaacccgcgaggccgtttcgggcattgccgaggaggccgaagcgctcgaccgcgattacagccgatatgcgcgcctttatggcctgctttcgggcaaaaacgcgatgcgcatgccgattttgcagtatgttctgagcatgatgctcgaggagaccgcggccagcgcgaaccgctttttctcgattctcagccgcgggcgctacgcgctgcgccgcatggaggcgccgaagggcgggcagggctacgccgggctcgacatcgaggtgctcgacggcatgagcggcacggcgcgctcaatcgagacgctctcgggcggcgagcagtttctcgcttcgctctccctcgccttcggcctctccgaggtcgtgcagggctattccggcgcggtgcggctcgacgcgctgttcatcgacgagggcttcggctcgctcgacgccgacacgctcgacaccgcgatgcgcgcgctcgaggccatccggcagggcgggcgcgttgtcggcatcatctcgcatgtcgcggagctgcagcggcgcatcccgacgatgatccgcgtttctcggaccgcttccggctccgccgcggcaaaggtcatctccgaataaatacaggcaaacgaaaaagcgtggaacaccgcatggtgcccacgctcttctgttttcaaccgttcgtattttgccggtgcaaaacccggtcagacagcctcctctgcactgcccgcaaactggctgttgtacaggccggcgtagaaaccgttttttgccatcagctcgtcgtgcgtgccctgctcgacgatgtcgccgtccttcatgcagaggatcaggtccgcgttgcggatcgtcgagagccggtgcgcgatgatgaagctcgtgcgcccgcgcatcagattgtccatcgcggtctgaatcgaaagctccgtgcgcgtatcgaccgagcttgtcgcctcgtcgagaatcatgatccggctgtcggagagcagcgcccgcgcgatcgtcagaagctgtttctgtccctgcgagacgttcgtcgcctcctcgttgaggatcgtgtcgtagccgtccggcagcgtgcgcacgaagcggtccacctgcgcggcgcgcgccgccgcaagcacctcatcgtccgtggcgtcaagccggccgtagcggatgttctcgcggatcgtgccgctgtagagccatgtatcctgcaaaaccatgccgaactcgcgccgcaggtcgccgcgcgcgaaatcggctatattcttcccgtcgaggtagatcgcgccgccgcgcaggtcgtggaagcgcatgagcagcttcaccatcgtcgttttgccggcgcccgtcgggccgacgatcgcgatcttctgccccgccttcacatcggccgagaaatcgcggatgacggtctcctcgctgccctcgtagccgaaggtgacgtggtcgaagcgcacgtcgccgcggatgtcgcagtcgtcgatcttatatttcggcgctttttcctcgatctcctcctcgccgaggaactcgaagatgcgctccgccgccgccagcgtgcgctggatctggttcgagatgctcgcaagctgcgtgatcggctgcgtgaagctgcgcaggtactggataaacgcctgaataccgccgaccgtcatcgtgccgcccgccgccatcgacgcgccgaggatgcacaccacgacgtagccgaggttgccgacaaagcccatgaccggctgcatcaggccggagaggaactccgacttccagcccgcgttgtagagcttttcgttttcggcgtcgaatttctcgagcgagcgcgcctcgccgccgaacgccttgacgacaacgtggccgccgtacatctcctccacgtgtccgttcaccgagccgaggtaattctgctggccgatgaagtatttctgcgaggccttgacgacgccgcccacaaagagcagcgtgaccggtacggtgcacagcgcgacgagcgtgagctgccagctgatcgagagcatcattacgagcacgccgacgatcgagcagaccgaggtgatgagctgcgtgatgctctggctgaggctctggctcagcgtatcgacgtcgtttgtgatgcgcgagagcacgtcgccctgactcgtcttgtggaaaaaggcgatcggcaggcggttgatcttctccatgatcgccgtgcgcatgttgtacgaaaccttggcggagacgcccgccatcgtgaagccctgaatgtaggagaacagggcgctcacgccgtacagcccgacgaggaacagcagcaccgcgccgatgtagccgaagtcgatgccctcggccgcgccggtgatgatgcgcatcaggccggcggtcagctcgtcggtcgccttcgcgaggatcttcgggccgacgattgtgaacaccgtggagagcgccgcgaagaacacgacgatcagaattttcaccttaaacggcgcgaggtagctgccgagctttcggaggcttcctttgaagtctttgaccttttcgccggtgatctgcccggccatggggccgtgcgggccgcggcgcggcgcgttcgtcatttttccgctcatgccaattcctcctttgaaagctggctttccgcgatctcgcggtaggtggggcaggtttcgagcagctcgcggtgcgtgcccctgccgacgatcttgccctcgtcgagcacgatgatctgctcggcgttcagaatcgtcgagacgcgctgcgcgacgatcagcacgatcgaatcctttgtgaacgccgagagcgcgcggcgcagcttcgcatcggtgcggaagtcaagcgcggaaaagctgtcgtcgaaaatatagaccggcgccttgcgcaccagagcgcgcgcaatcgcaaggcgctgcttctggccgccggagacgttcgtgccgccctgtgtgatcgggttctccgcgccgtcgggcagctcggagacgaactcgctggcctgcgcgcagtcgagcgcctcaagcacggctttgtcgtcggcgtcctcgcggccgtagcggatattcgaggcgatggtgcccgagaacagcacgcctttctgcggcacgtagccgatctgcgcgcgcagcgccgcctgctccatgtcgcgcacatcgacgccgttcaggcgcaccgcaccggcagtcgcgtcgtaaaaccgcggcacgaggttgacgagcgtcgatttgcccgcgcccgtcgcgccgatgaaggccgtcgtttcgccgcgctttgcggtgaagctgatgtggctcagcgtgtccttttcggcattgccgtagcggaagctgacgtcgtcgaacacaaggtcgcccgccgccgcgtcattcgccttctgcgggtgcgcggggtcgtggatcgagagctcggtgtcgagcacctcgcggatgcgctgcgccgaaaccatcgcgcgcggcaccataataaagatcatcgtgatgaagaggaacgacatgatgatctgcatcgcatactggatgtacgccatcatatcgccgacctgcatcgtcgaatcggcgatcgcatggccgcccacccacatgatgagcagcgaaacgagattcatcagcagcatcatgaacggcatcgcgaacgacatgacgcgctgggtgaagcggttcgtccacgcgaggtcctgattcgccgtgtcaaagcgcttttcctcaaacttctcgtttgagaacgcgcgcacgacgagcaggccgctcaggttttcgcggctgacgaggttcagccggtcggtcagcttctgcagcagcttgaatttcggcattgcaacgcgcaggatcacgaggctgacgcagatgagcacgataacggcgagcgcgatgatccagctcagcgaggtgctcttctgcaaggcgaagatgatgccgccgacgcccatgatcggcgcgtagcacagcatgcgcaggcccatcgagacgagcatctgcacctgcgtgacgtcgttcgtcgtgcgggtaatcagcgacgccgtggagaagcggtcgaactccgcgttcgagaagctctccaccttttggaacacgtcgcggcgcatctgccggcccaccgaggccgaaacgcgcgaggcgaagaagccgaccagcacggcggcgagcacgccgagcagcgcgatgccgagcatctcgaggcccttcatgacgatgtagctttgctgctttgcctccatatcgaggccgagctcacggtagaacaggccggtgaacgacgcgccgatctgcgagccgatcatcgactgcgcgttttcggcctcctgcatcgcatcgtcgagctgcgcctgcggcacctgcgcgagcatgggcaccagcgcgtaaagctggttcatatcgacgtcctgaatgccgctttccgcgtcgagcgcgccgccggcctgctcgcccatgccctttaagaaggtcataaacgcgtaggccgccttgtcgtaggcagccgcggcagcctcctgcgcctgcgcgtcgccggtcagttcgaccgcctgcacatcgccgatcgccgtgtagtccttctcgagcgccgcctcgcgggcgcctcccttttccaccggcgtgtaagccgcgcggaacgccgcctcgtccgtttcatccataaaggccgcgagcagttcctcgcccgaggcgttcatcaccgccggcagggcttcgtcgatgccgccctgctggatgcccgtgttgacgatgtcgctcatcaggttcggcagcgtcagatcgcacatcgcctgcccgaacagcagcagaatgctgagcagcaccggcagtgcgaacggctttaaatatttgccgagcaatttcatatggtcaccgatctccttttctgtgcaccgcggcgctttccgcgcgcgccgtgatgccgtcaatattcttccaaattctctgcataacatacaggaatacgtccagctcctcgctgccgatgccggcgcagatgtccctgtagaaatcctgccgcaccgttttgcagcgttcggcgatctcttgtgcctgcggcgtaagacgcaggcgcaccacccggcggtccgccgggtcctgtgcggtttcgatgtagcccgcccgcaccgcctcctcgacgttcttgctcagaagcgagcgcgaaacgccgagctgcttcgcgatttcccctgccgtatcggcctccgccgaagcgatgatcatcacgagctccagatgcttcgccgggacgccgagtgcctctgccatcgcccgcagccgcacgcgcatggcgcggtgcagcacatccatccgcgaggcgatgaagccgtcgaacacatacgccgcatctacccattcccctcgcattgcatgacctcccttgttcaaattatattcacaattcaacagtttaaaattgaattgttcatctttgaagtattttagcagaccgcgtatcaaaaaacaatggataaattgtaaacagttggcgcgggcttgcggggtaaaacccgacgaaagtaattgagcgcgcgagaaccagcgaatataatcgagcggcgcaggatgccggtgtgccgccagaaatacagataaaatccagcgcggcgatttcgtgtgtgaatcgccgcaagcctcccccccttgcccggcggccgcatactctgtggaaaaccgtgcggggtgcggcgcagaatgccagaacaggaagctgacggacgcagccggacgcgcagggtgatttgccatcggggggcacaggcagaatgcaccggcgattttgtgcgcgccgcgggactattccccgcccgccagccgcgtgctccgcgggaagcggtgcagggacgcgggcttgtaggggggagcctgcggatataaccggacgcatgaggtaatttgccgccggcatacgcgggcaagaaccgcgcctcgtgattcaaaggcaattcgccgcctgctttgcggcgtcgtatcgcttcgcgccccgatctgtgggaaaccgcggcattggcatttgggcgcaaaaaaagaaccgcaaaagcgggttgccctgcttctgcggttcgattttgtcggaaacgaaattacttaacctcgacctctgcgccagcctcggtgagcttcgtcttgagcgcctcagcgtcgtccttggagatgccttccttaacagccttcggagcctcgtcaacgagagccttagcttccttcaggccgaggccggtagcttccttgacaaccttgatgacattgatcttgttcgcgccagcggacttgaggataacgtcgaactcggtcttttcttcagcagccggagcagcagcagccggagcggcaacagcgacagcagccggagcagcagcggaaacgccgaactcctcttcgagagccttgacgagctcggagagctcgagaacggtaagagcctttacttcttcaataagatttgtaaccttctcagacatggtatgaacctccgttaaaaataatcgtttttaaatttgtttctttaattcgctgggcgaattattcggcggcggccgccttctgctcgcagatcgcgttgagcgcgacagcgaggccgcggatcgtaccgctcatgacattggcaaagccctgaatcggcgcgttgaagccgccgagaacctgcgcaatgagcacttccttgctgggcagcttggcaagcgcgtcaacgccggccgcatccaccgcggaaccgtcgatgaagcccgccttcaccgcaaacttcttgttcgccttcgcagccttctccgcatactcggaaaggatctttgcgcccgcggcataatcgctctcgctcatcgcgatggcggtcgtgccctcgagaacgctgtcgagcccttcgatgcccgcttccttgagcgcgcgggagaggagtgtgttcttgacgacctgatatttgcagccggcctcgcggagagactttctgagcttcgtgtcgtcctcgacgttgataccctcataattgacgataacgccggtaacgctgttcttcagctcttcggtgagcgccgcgacctgtgcctgcttctgctccaaaattttctgactgggcaattcgtttcacctccgacaatgtgaaatagcatatttgcatgcaaaaacgcccctccgcgtttgcagaggggcgtaaacagcctgaaaacagcgcttctcaaggggaagcgtttccttgctttactctctcctcggcaggcacgggaaccgttttacgccgcaaacccttggtttgtactggcacctgctgtctctggtgaaaacagcttaattattatagcatgacagagagagcctgtcaaggcttttttcagaaaacggatcagccgaccttgttcgggttgatcttgacgccggggcccatcgtggcggccacaacgcaggagcgaatgtactggcccttcgcagcagccggcttcgccttgttgatcgcgtcgagcagggtggtgaagtttgcgagcagcttctctgcgccgaaggagaccttgccgatcgggcagtggatgatgttcgtcttgtcgaggcggtactcgatcttaccggccttcgcctccgtgatggcacgggcgatatccggcgtaaccgtaccggccttcgggttcggcatgaggccgcgcgggccaagcaccttaccgaggcggccgaccatacccatcatgtccggggtggtgacgacgacgtcaaaatccatccagccttcggactggatcttctggatcatgtcgttgccgccgacatactcggcgccggcattgcgggcttcctcttccttctccggcttgcagattgcgagcacgcggacggacttacccgtgccgtgcggcagaacaatcgcgccgcggacctgctggtccgcatgacggccgtcaacgcccagctttacatggacttcaacggtctcgtcgaactttgctgtacctgtctttatgcagagctcaagcgcttcttccgtatcataaagacggctgcgctcgatcagctttgcgccttcgacatactttttaccgtgtttcattcaagttcctcctaaagtggtgaatatcggattctcagagagtttcctcccacccgggtaaaatcaatctacaacttcgatgcccatgctgcgcgccgtgccggcgatcatgctcatcgcactctcgacggatgccgcgttgagatcgggcattttctgctcggcgatcttctttacctgctcgcgggtaatctttgcgaccttggtcttgttcggtgtgcccgaagcggtttcgatgccgcacgccttcttgatgagaacggctgccggcggcgtctttgttacaaaggtaaaggaacggtccgcgtaaaccgtgatgacgaccgggatcacaagacccacatcgcccttggtgcgctcgttgaattccttcgtaaatgccatgatgttaacaccgtgctgaccgagagccggtccgaccggtggcgccggagtagctttaccggcaggtatctggagcttaataaagcccgtaaccttctgagccatttttttgcacctccaaaattcgtggttgctggcggaacgtccggtttgaatttggacgctcctcccacagggggatatccccctcaataaaaagcggagacccgcagtttaccgtaatcaatcgaccggttcagcctgatcaagctcaagatcaaccggcgtttcgcgcccaaacatcgaaaccgtgacgcggatgcgattcttatcgatatcgatctcgtccaccgtcccgataaagccctcgagcgggccgtcggtgatctggacgctgtcaccgaccttgtaggagacctccacgttccgcgtttcaacgccgaggcgctcgacctcttcggccgtgagcggaatcggctttgacgacgggccgacgaagcccgtgcagccgcggatgttccgcaccgcgtaccaggattcatccgtgagaatcatcttgacgatgacgtagcccggaaaaatcttgcgctccacttccttggtctttccgttggagccaacctcgagaaccttttccgtgggcacgcggatctcatggatcaaatcctgaagctggtggttttccaccgttttctcgagatttgacgcgaccttgttttcatacccggaataggtatgaacaacgtaccatcttgcttcgtccgacatttcgtttcctccgcttctaaatcaacgcgcttacttcgccacttccatgacgaggccgagcagattcatgaagacggtatccagcaggaagatgaagatcgccagaacgatgatcgtgacgagcacgacgccgacgtttttaaaaacggtattcggcgtgggccacacgatctttttgatctcgcccttgcagtccttgaaaaactttccagccttcttgataaagcgaacaaagccgttttcttttttcgttgtttcggccatattaccctcgctttacttcgtctctctgtggagcgtatgcttcttgcagaatctgcagtacttgttcatctcaagtctgtcgggatcattcttcttgttcttcttcgtgttgtaattgcgctgcttgcactctgtgcaggccattacgacttttactctcatgacggcacctccgttttacggaataaatttggggttcagccccagcctccctcataaaaaataggcgcaaaaaaatagcccctatactgaggtgtacctatcataccatagggcacgccgctctgtcaagggctattttgcaaatttcatgcggtttttcagccgttcagacgggcctcgaccttcttctgcttcttctgcttctcgggcttgatcttcttgccgatcagctttctcgagtgcttatagaccttctgaaggtcgcagccctccgtaaagttctcgatgatgctctgaatcgccgcgtccccgatgttgttgagcacgccgaactggatgaccgcgcgggtatccatatcgccggcgccgtacatctcgcacagcacggtgcacaggcgcttcatcggctcgctgtccttatagtgcagcgcgagctgctcgcacttcggggcgaccttctcctttgcgaaaatcgccgggcgcacctgcccgtacacgatgcgctcctcgttcatctcgtcgcgcagctcggggaagatcggcacgaggcggttcaggaagaactgcgggtcggcgttgttctcctcgtccttcttgcggcgcttcttcgccgatttcaccatttcgcggcgcttcgagccctgcacgatctcgaggaagtcgttcgcgatgctctcggcgtccgccatattgttttccttttcgtcgaagagccacagcgaaagctggcgccactcgcccggctccgtcggcgttttcatcgaagtgctccgcagcacaaagcgcttctgcttcgtctcatagaacaggccgtaggcgacctcgccggtcgagaacatcacggccctgccgctctccgattcgatcggcgccgccgcgccgaagccctgctcgccgagcgcctcctgcaatttttcctgtatcagctcaaaagccttctgctccaacaaaatcactccgaaaatcaaattacaaatcagtatagcacacggcgcgcaaaatgtctattgttttttgcgctttgcctgtggtagaatggtaaaaaagaaagggtgagagccgtatggcagaatccggcagcacagcctcggtcaaacagaacaacatcgcggccatccgcgccgcgctctaccgcgccgatttcgcgacgaaaaaggagatcgccgcgcgctgcgggctgagccttgcagcctgcacggcgctgctcgcggagatgatcgccgacgggcaggtgcaagagctcgctttcgccgcgcccaacggcggccgccccgcccggcgctttgcgctgaaccccgattacgcgcacatcctctgcctttacaccgacaacaacgcgactgacggcgcgggcatcgcgctgcgcgtctgcgacctcacgggccgcgtgcgcaccgaaaagttctgcccgctgagcgacattctgcccgacgacctcacggcgctcgtctcggagaccgccgcgaaggacccgctgatccgcgccgccggcatcggcatcgccggcgtaacggaccacggcgggcgcatcacagcgggcagcttccacgggctgaacggctttaacccgcgcgccgcgctcgaggagaagctcggcatcacagtcatcaccgagaacgacatgttttttacctcctacgggttttacacccgcaatttcacggggcggccctactcgctttcggtgctctactggccgagccacaagtgcgcgggcgcgggcaccgtggtgaacgggcaggtcattgtgggcagcacgaagtacgccggcgagcttgtcagcctgccgttcccctccgcgtcgctctcaaaggacgaatcgctcgcgcggatgatccgcggcgaggaaaccgtgccgctgatgggcaccgccgctacctgcacgatcgcgctcatcaacccggacatcatctacctgaccggcaccgcgacgctcaacatccgcgagcgcgacatcatcgactactgcaagcagacgattccggaaaaccacctgccggagttccgcattcaggcggacatccacgaggagtacatgaccggcatcttcgagacggcgcgcagaaagctgcgctttaaccgcctgtgacgcggcggagtgtgacgtttcttcaccgcgccccggcgcgatgcccctgccgaatttcgcggtgttccacagctttgtgaggagcttcatcccggcgcacaatactttgcggcggcggccctcgcgcgcagccacgcccaaacgcgcccattttcacacacggttcaactccaccccagcgcctgtgccgagccctgcccgatgccgcgcggggcggcgtgcggcacagcatatccgcagacatattccgcgggcgtcttttatgatgcggttcggcgcacatgtcctttcagcaaagacacgcatgccgtttgacactgcacggcggacaccgaaaaaaaatgaaaaaataggactttacaaacacgggcggatgtgctaaactgcttttgtcacgagatgtcgaaagtaaccgctgtgtcacggacgcagtcttttggggttgtataaacgggtgcgtccggcgcgggaagcgttcctgcgccgcgttcccgcggcattataagaaaataacgggccggccgaagcgcgcatctgctttcggccggcctttgttctgcacccatgcgccgtttgcgcagggctttatttttttgcctgcggcttttcgccgcgccggtgcagcgcaccgcctgccgcatcggtacgccgtcagcgctgccgggcgatttccgccgccgcgcgagcgagccgctcgatcgccgcgaaatcgccgctttcgagcagcttttccggcaccatccagcttccgccgcagcagacgacgttcttctgcgcgagatacgccgccgcgttttctgggctcacgccgccggtcggcatgaacgccatatggctgtaaggccccgagagcgccttgagcatcgcgacgccgccgacaacctcggctgggaacagcttcacgaaatcgagccccatgcgcatgcaggcctccacctcggtgggcgtggcgcagccggggatcaccggcacgcccatttcaaggcaccatttcacgacggccggattcgtgcccggactgatgacggcctcggccccggcctccacggcgcgctcggccgtctccgcattcagcaccgtgccggcgcacacgcacaccgcgggcacctcggcgcggatgcggcggatcgcctcggcggcggccggcgtgcggaacgtgacctcggcggcgggcaggccgcccgcacacagcgcgcgcgcaagcggcacggccttctccgcatcgttgattttgatcaccgggatgatcccgatggaagcgagcttttctctgatcgtcatcgatacaacaccctttccctttgctccccttattgtagcacccgcgcggccgctttgcaaggtgcacaccgaaacttgccgcttgaatcttcccgcccgccgccttataatggaggtgtggccacggccgcaatcctttgaaacgaggttcccaatgaaaaaagtgatgattctcgtgatagacggctgcgcccccgcctatctcaccagacagacggcgccgaacatctaccgcctcgcgcgcgaaaccggttttgcgaaaaccgtggaatgcgccatgccgtcggtgacgaacgtcaaccacgcgtgcatcctctcggggcggtggcccgccgagacgcagatcgccggcaattactactacgaccccgagacccgcgcggagggctttattgaggagcgcggccgcatgcaggccgaaaccctgctccagcgctacgccgcgctaggcggcaaaacggcgctgctgaccgtgaagggcaaggtgctaggcgtgtacggcgacggcgcctccgtcggcctgagcgcgcagacgccggacgatgtcctgctgcgccgctataagttggccccgccgcccgccatcgacagcgtggaatcgacggagtggattctctccgccgcctgcgcctgcatccgcgaggacgaccccgacctgctctactgcacgacgaatgactacatcttccatcacttcgcgccgggcacaccggaggccgccgcgcagatcgccgcggcggacagctatatcgcgcagatccacgcgctcgcccccgaccggcagatctacatcacggccgaccacggcatgaaccagaaaaccacgatcctgaatttcgggctactcgccgacgcggcgggcttcgacgtctactgcctgccgccgctcaaggaccgctacatcgaaaaccacatctatcaggagggcggcatgctctacgtctacctgcgcaacccggcgcaggcggaagcgtttcgcgcctttgccgcgggcatcccgcagatcgagcgcgtgctcacggccgaggaggcctccggcgcctaccggctgccggagacacagatcggcgacttcgtgctcttcgccggccgcgacagcgctttcggcgaggcggagaccgccgtgctccacaccgaggcctcgcgcacgcacggctcgctctacgagcgcgagatcccgctcatcgcgctgaaccccgaggcgcccgccggcgcctacgcgtacaacaaggacgtggcggccctgctctttgaatcgctcgcgtgaccgcgtggcacaatactgctctgccggcacggggctttgcgccccgctttccggcgggaggcctttgcggccggggcatgcgctccggccgcttttctgcatatttgggcttgacaggcggcgcgggaagtggtaacgtttaaatatcatctgatatttaatttcaacgggggcggttttatggcgcggacggtgcgcatcacagaggaaatgattatcgaggccggcgtgcggctcgtgctggaggcggggctttccgcgctcaacgcacgcagcctcgccgcgcggctgcactgctcgatccagccgatcttccgcaatttcggcagcatggaatcgctgcgggacgccgttctgcgcgggctcgaccgcgtttacgccggcttcatcgagcagcgcatcgacaaaagcgactggcttttcacgatcagccgcgcgcacatcgcgctggcgcaggcggaaaagcacctgttccacgccatgttcctgacgaagctgtacggcacgcgcaccgtggaggagatcgtgcagtcgagctggaaccgcgagacgatcgactgcaccgccgtgcagtacggcctttccacggccgacgcggaggccgtgtaccgcgacgtgcgcttttatgcgttcggcatcgcgctgggcgcatacgccggcacggtggcgctcgcgcccggagaagccgacgcgctgctgcggcgcgcaatcgagcgcttcgccgcgccgcacgcacggaaaaaggaggctttccaatgaaaacaaacgaaacccgcatgcgcgagctgcgggcgtggctcgcacagaccgaaagcacgcccctcgaggagatggatgcgtttttcacccggcggctttcgggatacgaggcgcatatgctcgcccactgggcggcggattacgagaacctcgccgccgcggtgccggccgatgcgcagcgcattctcgacctcggctgcggcacggggctggagctcgacgcgattttccggcgcttcccgcagatgcgcgtcaccggcgtcgatctttcgcccgcgatgctcgagcggctgcgcgaaaagcacggcgggcgcgcgctcgagctgatctgcggcagctacttcacggtggatttccccggcccgttcgacgccgccgtctccttcgaatcgctccaccatttcacggcggccgaaaagctgccgctctttcggaagatcttcaaagcgctcgcgccgggcggcgtgttcctaaacggcgactacttcgcctgctgcccggaggaggaaacgctcctgcgcgccacgctcgagcgccggcgcgcggcggagggcatcccgccggagcggttcgtccacttcgacacgccgctgacggtcgagcacgaaacgcaggtgctgtgcgcggcgggcttttccgaggtttttgtcgccgcgcggaccgacggcgcagccgtgctctgcgcccaaaaggcgtgaagcacggccgcctgctgcgcgacgcggcatttttcacgccggcgcatcagcgggcgcttcttatgcaggcaaaggaggcgcgcggccgggacggcgttccgcttttacattgtgccggtggcgcggcccgaaaaaatcatcgggctggacaatgtggtgcgcggcgcgttttgctccgcctttctggaggataagccggacgcggactacctcagccgcggctatatgaccgccgccgcggggatgctcgtccgatacgcgttccggaaatcggggctgcaccgcatcgaagcaaacgtgatgccgcgggttttggagaagaacgggtttgtaaacgaagggctttccagagattgcctgaagatcaacggcgtttgggaggaccgcatccacatgatgaaaatcaaccgcgccatgcgcggccgctgaacgcgggcgaaaatcaaacaggcggacgcacgaaccgtgcgctcccgatgccgggcggtaaatgcaccgcatggccggggacgcgctttcgtgctgtccgcctgtatttttcttacatctatttaccgttatttaccgcgccttggcatccgtttccgccgcccagagctcgagcagcttgtgcgccacgccgtccgattggttcgagaggatcaccgccgcggcctccgccttgagcgcttccgccgcattttcgaccgcgtagcccgcatcggcgatgcgaaacatcgagcggtcgttttcgccgtcgccaaagcagacaagccgcgtgcagccggagagcgccatcagccgctttgcggcctgcgctttgctcgcgcctttcggcatgatctcgaaatagtaggcgtcgctgtacacgtcgcgctgcaaatggacgatgaaccgcccgtcggcgcacagcgccgcatacggcgcctcgcaggccgcgcggctgtccgcgatgaccgtgaaataaaaggcgcgcccgccgtagagcgcctttggctcgacggcatgcagccgctcgtcgccgcggcgcgtttcgaggtactgcgcgaggccgcgcgagcaccccgcctcgacataggcgacgcgctccgcccgcacgtgcgccttagcgcgcgaatagaccatcgggcgcagcccggccgcctctaaaacgccgcggatgaacgcggtttccgccggtgtgaagtacaccgcgtcgagcacggcgccgctctccgcttcgacgatggccgcgccgttatagacgatcacgggcaggcgcgcgcccttaagcgccgccgtcaccttcttcgccgtggaaaaggagcgcgccgtcgcgtaggaaaacgccatgcccgacccgagcaggcggcgcagcgtctccgccgtaaacggcgagagcgccgcctcgggcgtcagaagcgtgccgtcgaggtcggagagatagagcgttttcatgcgttgccggaggtcgcgctgaagatcgcgccgcgcacgccgtccagcttgacggccacgcccgacttcaagatgtcggtcgcgtaggccgcgccgatgatagcgggcttatcgagcgccatggcggcgatcgccgcgtgggaattcgcgccgtccatctccgtcacaatgcccgaggcctgacggatcagcggcatcagcgcgttcgtcgtcttggacagcacgaggatgtcgccgcgcttgaacttctgcagcgcctcctcctccgtcttgcagacgcagagcgtgccgcagacgctcagcccgttgacgaccgagccggagacgagcacgtcgccgacaaggtgcaccttgagcatgttcgtcgtgcccgagatgcccagcgggatacccgccgtgatgaccgcgatgtcgccggccttcacgaggccgcgctcctcggccacgctgacgacgtgctcaaagaggtcgtcggtgctcgttttttcctcgagcagaaccgggacgacgccccacgagagcaccatctggtttaagaccttcgggtccgtcgtgccgctgatgatcgggcatgcggggcggaacttcgagatcatgcgcgccgtgaggcccgtttttgaaaccgtgaggatcgccaccgcgccgaggtcgtgcgcggtcgtgcacgtggcgtgcgagatggccgaggtcacgtccttctgcacggagcccgaccactgggtgaactgcttgatgtagtcgatgtcgttttcggtgcgctcggcgatgcgcaccatcgtgcgcacggcctccaccgggtaggcgcccgcggccgtctcgccgctcagcatgatcgcgctcgtgccgtcgtagatcgcgttcgcgacgtccgtggcctccgcgcgggtcgggcgcgggttcttgatcatcgaatcgagcatctgcgtcgctgtgataacctgcttgccggcggcgtaggccttgtggatcaggcgcttctggatgaccgggatatcctccatcgggatctcgacgccgagatcgccgcgggcgaccatgatgccgtccgaaacgcggataatatcgtcgatattctcgacgccgtccgtattctcgatcttcgcgatgatgcggatattgcggcagttgttgttttcgagctcgttgcggatgaggacgatgtcctccgcgcagcgcgtgaacgaggctgcgatgaaatcgacgtcctccttgacgccgaacgcgaggtcggccttatccttttcgctgatgtacggcatcgagagcgtgacgcccggcacgttgatgcccttgtacgacgagatcgggccgccgtttaaaacgcggcactccacgtcggtctccgtcacgtgctcgacgatcatctcgatcaggccgtcgtcaatgaggatgtgcacgccgggcgcgacatcctgcggcagctttttgaaggtgacggagcagccctccagatcgccggggcggtcgagcgtcgaaagcgtgtatttctgcccgtattcgagcacgacgggcgtttcaaacgcgccggtacggatctccggccccttggtgtcgagcagaatggcgaccggcacgtcaagctcctcgcgcagcttctttaccatgtcggcgcggcgcttgtgctcctcgtgcttgccgtgcgacatgttgaggcgggcgacgttcatgccgctcagaatcagcttgcgcagaatggcctcgtcgtccgttgcgggaccgagcgtacatacaatttttgtttttctcataatcagggctcctcgcgttatttttttacatccaagccaaacggcccaatctttagtcatctatgtatactataccggaaaaatgccgaaaaatcaagcggcgcgggcggcgcttcggataatttttgccaaagccctaggggcggatgcggaacacgcggcgcgcgggccgcttcgtttcgggcgcttcggccctgccgcgcaggaagcgcttctcaatttcgcacaggagaagcggcgtgagcgaaagcgccgcgacgatgccccactgcggcagcgtcagcgcggcggtgccgaagagggccgcggcgggcggcagcacgatcacgcccgccatgagcgccgcgcagatcaaaaacgagaggttgagccagcggtttttcagcatgccgtgccccacgaccggcttcgcgctgcgcatgttgaagctgtgcacgagctgcgagagactgagcaccgcaaacgccatcgtgcggccgatcacgggcgacattgggtcggtatcgtacagcgcgcggccggccgagaacgccagaagcgcgagcgcgccgatcatcatgccctccaccgccatcgtgaggccgagcccgtttgaaaacacggtgctctcctgcgggttcggcggcgactgcatcacgtcctcctgcgggggatcgctgccgagcgcgagcgcgggcagggaatcggtgacgaggttcacccacagaagctgcgcgggcagaagcggcgtgggcgcgtgcatcagaaacgccgtgagcaccacgaggatctcgccgacgttgcaggacatcaaaaagtggatcgtcttgcggatattgcggtagactgtgcggccctcgcgcacggcggagacgatcgtcgcaaaattgtcgtccgtcagcaccatatcggcggcgttcttcgcgacctcggtgccgccgcggcccatcgcgcagccgatgtcggcggccttgagcgccggcgcgtcgttgacgccgtcgccggtcatcgcggtaacgagccgcaggcggcggaacgatttgacaatgcgcagcttgtgcgccggcgaaacgcgcgcgaacaccgagcaggtcttgacggtttcgagcagcttttcgtcgctcatcgcttcgagctcggcgcccgtcgtaacctgtgccgtgtcgatgccgagccgcccggcgatcgccgcggcggtggagggctggtcgcccgtgatcatcacgggccggatgcccgcgcccctgcactcgagcacagcctgcttcgcctcggggcgcggcgggtcctcaaggccgatcagcccgaggaaggtgaggccgctttcggccgcgtcgtcggaagccggcagggaatccgcctgcttttccgccacggcgagcacgcgcagcgcgtcctgcgccatctcggcgttgcgggcgaggatgcgcccgcgcaggtcgcccgagagcggcagcgtctgcccgccgcttttcgccgccgtgcagcgctgcagaagcaggtcgggcgcgcccttcacgatcacgcggtagccgctttccgtgcgcagaatcacgctcatgcgcttacgctccgaggtgaacgggatctcccccgccttgacgcgccccttgagcagcgcctcgagattcggcgccgccgccgcgatggcggtttcggtcggcgcgccgaccagcctgtcattttcaagctccaccgttgtgcagagcgcggcggcggagagcaggccctcggccgccgcctgttcgagcaggcccgcgccgtcggcacagcgcaccacggtcatcttgttctgcgtcagcgtgccggtcttatcggagcagatcacctgacagcttccgagcgtctccaccgcctgcaaatgccggatgatcgcccgcttcgccgccatacggcgcacgccgagcgcgaggacgatcgtgacgaccgccggaagcccctcggggatcgccgcgaccgcgaggctgatcgatatcataaacatctcgagcggatcgacgcgctggacgaggccgatcgcaaagagcgccgcgcagatgccgacgaccaaaagcccgatgagcttgccggttttgcgcaggcgcgccttgagcggcgtatcgggcgtttcctcctcgccgagcatcgcggcgattctgcccatttcggtttccatgcccgtggcggtcaccacgccgacgccgtggccggacgcaacgcccgtgccggaaaagagcatgttttcccgctccgccgcgccggccttttccgcgcagagggcaccggccgatttcgccgccggcaccgattcaccggtcagcgcgctttcttccgcgtagagctgcgtgctctcgagcaggcgcaggtcagccggcacgacgtcgcccgttttgagctgcacaatgtcgcccggcacgagcgcatcgctcggaagcaccgcgcgcctgccgtcgcgcaggacggacgcgtgcggcgcggacatcgagcgcagcgcctcgagcgcgtgctcggccttcgcttcctgcaccgtgccgatcagcgcgttcgccatcacgatgccgaggatcagcagcgtatcggcaaaatcggcctcgccctgtatgcacgacgtggcgaacgaaaccgccgccgcgccgagcagaatcagcaccatgaaatcgccgaactgtaagatgaagcgctgcaaaagagtctttttcttcccctttttcagggcgttcggcccgtacttttgcaggcgcgcctcggcgtctgccgtgcgcaggccgctttcccggtcgcttttcaggatgcggagcgcttcctgcgcgtccatcgcgtgaaacgctgtgttttccgtcgtctgttttgacatgtccctgcctccttttgggatatgcttatgctggggtgcaggcgtttagaagaattcagggctggcgcaaaacataaatctgtggtacactagccgtaccggccgcgcgcagcgggccggattccaccgaaaggtaagtgaagcctatgaccctaacgggcattcccgcgccggacgccgcggtgatggaattcgtgcagaaccacatgcacaacaccgtgaccgacgccgtttttcccatactgacgtatctcggcgaagcgggcgccgtctggatcgcgctcgcgctcacgctgctctttttcaggcgcacgcgcgtcaccggcatcctgatgctcgtctcgctgctgctcacgtttttgaccggcgagctgctgctcaagaacatcgtgtgccgcccgcgcccgtgcgccgattttcccgacgtgccgcttttgatcgcgcggcccggctcctactcgttcccctcggggcacagcggctcgagcttcacggcggcgacggcgctcttcctgcgccaccgcaaggggggcgcggccgcgctcgtgctcgcggcgctgatcgccttctcgcgcgtctttctgttcgtccactacccgacggacatcctcgccggcgcgctgctcggcgtgctgttcgccctcgccgtgtatttcgtctataagaagaaaattgagccgcagcagccatacgcgtctgtcacgcgcatgaaatgacctgtgcggccgcttcgtgcagccgaacacgactgccgcacgcgcaaagtaacctttgcggctgtgcacttgccgccgcgactgaaccgcgcgcatcccgccggcggcagaaaggccgcgcatccgtttccccctcgggagcgaatgcgcggcctctttcattttacgatcgttttttgagccgtgcgcgcagggggaaaatccgcggattttccccctgctttccaccggcgcgggccaaacggttgaaaaccgcgggcaaagcgcctatagattccggcacaggccgacggccttgccttcgatcacggcgcggttgatctcctcgccgaccagcacgatcggcgggaaagccgggttttccggctggagcaccaaacgatccgggtagctgtagacgtgcttgagcgtggcctcgtcgtcgatgcgcaccgcggcgatctcgccgttttccacgaccggcgtgcggcgcaccgccacgacgtcgccgtccttcacgcgcggctccatgctgtcgccgtggcaggccagcgtgaaatcggcgtgccacatcttcggcacgctgtcgtacgtctcgatgttctgctcggcgaggatcggctcgccgcatgcgatttcgccgacgcgcggcacggcggtcatctccggcagcggctcgaagccgggcggcaccgcgcctgcggcgggcgcatcctcccagcccatgaggtaggccggcgtggtgtgcaggacgcgcgcgagcggctcgagaacggcgcccggcaccttttcgatgtcccctttttcgtaccggtacaccgtggcgaccgagacgccgagcgccgcggccacatcctccacggagatcccccattcctttcgcctctgcttcatgcgctctcccgtcgtcactgccgccgtctcccttccgtttcctagatttacatgcttatcgtaccatgcttttctcaaaaatgcaactgtttttttcaaaaatgcgaaaatcaacttgacagcgccgatcgaatctgctaccatgaaagcagaggggttcgcagaaatgcgatttctgcggtgcacatgcgccgcacatgcagggccgcggagccctaaaaccgaaaggggaggttttttgaaagcaaacaaaacagacgcgggcgggcgcgcacagcccgcgccgcatcaggtcggcgaaagggtgcgcggacggaccgtgggcgattctccgcgccggagcgcggcgcgcgggcagaccctcggcgattctccgcgccggagcgcggcgcgcgggcagaccctcggcgattctccgtgccggagcgcggtgcgcgggcagaccctcggcgattctccgtgccggagcgcggtgcgcgggcgggccctgagcacaccggaagcggccggtcgtctccgcgatgcgggcagatgtggacggcggacaagtgccggcagatgtgcggggcgtgggaatcccgcagcgggaaatcccgggcgcacacgcttttgccggccggcggctttattttttatcccaatattcgcatttacgcgaatcaataattttaaatccaaagtttattccacactttcggatgcaccgtgtccgcgcagacatgctgggcgaattttattcgaggtgtgctgcggctgcacgaaagcgcgtccgcgcaaacacgcggggcggcgcggtgaaggacacgggggcgcggagagggcggcgcgcgttttatccgccggctcccccgcagggcgcgcggcgcgcgggaggctgcgatggccagaccgctgaaggacggcgtggactactgggccttcgacgtaacgcttttgcaggaccgcaagtttcggctgatccgctcggaattcggcgtgtacggcgtttacatcgcgctcgagcttctgaacctcgcctaccgcgagcacggctactacgctcccttcggcgaggaggactgcctgctgctcgccgagagcatcggcggctgcgcgccggacctcatccgcacggtggccgcggcctgctgccgccgcggtctcttcgatgcgggcgtgttcgaagcgtgcggcgtgctgacctcggcgggcatccagcggcgctacctgaagatcgtcgcgaagaaccgcgcggagatccgcatcatccgcgaatactggctgctcgacgcggccgccgagcgcgacgtgcctgcggcggcccgcgcgaagctcgtgtttatcgacgccggacaggccggaaaaccgcgcaccgagggcgtttcccccgccgaaaacgccgcggaacgcgcggaaaatccccaaagaaaagaaaacaaaaggaaacaaaagcaaagcagaagcgccgccccgcgcttcaccccgccgtcgccggcggaggtggaggcctactgccgcgagcgcggcagcggcgtggaccccgcgcgcttcatcgactactacacggcgaacggatggcgcatcggccgcggcgccatgcgcgactggagggccgcggtgcgcagctgggagcgcaacgccttttcggcgccgccccggcgcgagcccgcttacggggatttgcagcagtacgaggactacgacatttttgccgaccgccagaaagcccccgcgtccggatcaggagccggcgcgcggcacgccgaaggcccggcgattcccattgcacaaaaggagacacagcgatgacaaaagagcttttagagcagtacccggacatctgcgccgagctgcgcgggctggaggccgaggccgcgacggtctacagcgacatagtgaccggctcgcggaccgaatttccctacacgatgcgcacggtgcagatctgcggcacggcgcccgtttcgccggaaaccgcggcgtatatggagcttctgcgccaacaaaaggcggaaatcgaggactttgcggacagcctcacttccccgcgcaagcggcggctcgtgcggtgcgtcatgcagcacgggcggcggtggaacgtcatccgccggctgatgggcggggacaagtccccggacgcggtgcggatggaattcgaaagaattttcaaaaatttttagaaacgttcgttctgttcgctttgttcagatatactgaatcatggagacagcatacaggacgcaccggcgccccataccgccggcaggcgcggcatacagcggcatctgccggacgtgcacagggcgcggcgcgggatgaatggagcgcagcaagcggatgaagcgtgcgccgcgggtgaagcgcgcggcgcgggtgaaattacccggcggcgtcgggcggctcgctcccccttgatctgcggtggaatccggcggggtttgaggagggggtgcgggcgcggggcgatccggcagcgcgggcgttcggggcggtctccacatacggcggcgcggtctgcggcaatgccgcgggcaggcgccggggcgggcggcgggaaaatacacgcctgaaacggcgggcgcggggcgaacgccccgcagaggaggtgattcgatgagagcatacgggatcggcgcgctgtacggcggcgtactgcgcgcggtgcgcgcggccttccccggcgcggccgtgcatgaagcgctgcccgcggacgggcttcccggcggcgcgctctgctgcgggctgtacgacgccgaggtcgcgctgcagaccggcgggcgcgtgcgcacgcaggccgtattcgaggtgttttacgcgccggcgcaggacgggccctcctgcgccgaagcggcagacactttgctcgaggcgctcgcgcagatcgagctggaaaacggcgtccgcgtgcgcggcggcgcgctggaggccgggcgcgctgagaaagcgcccctgcgggcggcggcgcgttatgcggccgccttctccccggcaaacacggcaccgaaaatgcaggccgccgaaacaggcttggaggtcaaagcatgagagagaacggcaaatccacgggggcggcgttcacccgcgcacagcttctgcgcagcgcgcgcttcgcgccccacaaagacattttggccgctctgctcggcccggacggggtctacaccctcgccgaggccgacgcggtcatccggaaatttttaaaaaggaaggtgctttaaatggctcttggaggcggaatctggacagcccagaacaaggggcttcccggcacgtacatcaacttttcgagcgcggcgcgcgcaaacgcctcgctcacggcgggcggcgtggtcgccgtgccgctcagcctttcgtggggaccggaggaaacggtggtcacccttaaggcgggcacgatcgcccagacctgccgcgacctgttcggctacagctacggcgcgccggagatgctcgccctgcgcgagcttttccgcaacgcggagacggtgctctgctaccggctcggcacgggcgcggcaaaggccgaaaacgactacgcggccgcaaaatatgcgggcgcgcgcggcaacgacatcaagctcgtcatcgaggcagacccggacggcgcgggcttcatcgtcgagacgtatctcgacggcacgctcgcggacagccagcgggcgaaatcggcggcggaattaaagccgaacagccttgtggacttcaaggcggaggcgacgctcgcggcaaccgcgggcacgacgctcgccggcggcagcgacggcaccgcgccggacggcgaagcgtacgccgcttttcttgcggcggtcgagggctacagcttcaacgtgctcgcctgccccgccgcagacgccgcggtggtcgcggtctttgcctcgttcaccgagcgcatgtgccgcgaggccggcgcgaacttccagctcgtcgcctaccgcccgcagacagacagcgagctcgtcatcggcgtggacacagccgcggagggcggcctgccggcctacggcctcgtttactgggcggcgggcgcggcggcggcctgcccggtgaacggctctctgacgaaccgcctgtacgacggcgagctgacgctcacgctcgcgcagacgcaggcggagcttgaggccgcgatcgccgcgggcaaattcgtgctgcacaacgtgaacggcgcggcccgcgtgctcgaggacgtcaacacgctcaagacgctgacggagacgcgcggcgaggactttaagagcaaccagaccgtgcgcctgtgccacgacgcggccaaccgcatcgcgctgctcttcaacacgcagtacctcggcatggtgccgaacgacgcgaacggccgcatcagcctttggaacgacgtgtgcaagattttccagagctacgagaaggcccgcgcgatcgagaacttcgacaccgcgagcgtggaggtgctgccgggcgaagccaaggacgccgtgcgctgccgcgtgagcgggctttcggtcatccgcgcgatgagcaagctctacatggacattgtgatcgcttaagggagggaattcaacatggcaaacgacaaggtatttatggacgcgctcgaggcggttgccggctcgatggcgacggcttacgtgacgctcggcggcgtgcgctaccgcctcttgcagctcaaaaattttgaggcgagtatggaaatcacggtttcggacgtgccgattctcggcaagaccggcaagggccacaagcccagcggctggaacggcacgtggaagggcaccgcgcactacaaccagtccatcctgcgcgaggtatggctcgcttacaagaacaccggcgcactgccggagatggacattcaggtgacgaacgaagatcccacttcctcggtcggccgccagacggtcatcctcaagaactgcctgacgaagggcggcatcctgacgaagttcgacgcggacgccgaaacgctcgaggaggacatcgagggcacgttcgacgactgggagatgccggaaaaattctcgctcgtcgcgggcatgcagtaaaaaaggaggctttaacatggcagaaaatctgagcgcctttctggcgcagaacgctaggaagatcgacacggtgcgctacgtcgcctccgaccgcttcacagggccggacggcgcgcccgtgccgtgggaaatcgggtgcattacggcggcggagaacagccgcatccgccagggctgcatgaaaacggcgccgggcgcaaagcgcgggcagaccgcgcagcagtttgacgcgggcctgtatcaggcgcgcatcgcggcgcgctgcacgctttcgcccgatctgaacgaccgcgcgctgcaggactcctacggcgtgcacacggcggaagagctgatcgcgacgatgctgacccccggcgaattcgaggactactcggcaaaggtactcgaggtaaacggcttccaaaccgaggcggagcgcatcgaagaagcaaaaaactgatcgaggggggcgatacggaggcgaactacgcctactattgcctccacaagctgcggcttctgccgcacgatttcctcgcgctcgacccgtatgagcgtgcgttcgtcatcgccgccatcgatgtgcgggtggaatcggagcagaaggaacagcgcaagctgaagcgcaaatagccggaagcgccctgcaaagcggggcgcttttggttttgcttgagacatagctaaaaagcggttatttacccgagtatgcgtgcagacaatttactttcttccaactgcatggtataatggcgccagaaactttttggaggcgatctcatggtgctgctttcatccgcggcggacgaacctatcgacccggggttatggattggcttagtcattattgtgtttattattgttttgttggtcctcggcattgttttgattatccgaaagatcacaaagagcacgaagtcaaaacaaacgcttaaaagaacagcacaattttataaagcacagtatggtgcagccgaggcggtttatatgaaacatatcgccggattgcctcttatcgccggcagtatgtgttgggttatgctgcgcccgcagggtctgctgttcgaatacaatcacacggcctatgatttatcctttgagaaaatccgagatattcgcactaaagacgaggttccaccccagtataactcggttcgcactgtctttggctatgacggccgtaccttagcacaaaaaatcaaccgaatcttacttttcgatatttggaatccccgcaatggtattgcacgaaaacttattacccaccagccgatttcctgccaattccatataacatatatcgataaagataagccgaagctgatttctttgcaatgtccggatacccagctggcaaaaccatttgtaaccgcctatttttcgaggccccccatacacaagaatatttccctgtaaatcggaacaccttgcaaagcactgcaaggtgttccgatttcgttatttttcgaaaggaggattcaatggcaacgattgcctcccaactcagcttttctgaaaatatgctctctacacttcaaaaaaccaataaaatggtagagcgtattgaacgaaattttcagaaaacaagtcaagctcttggccttatagatcttggattgcaatcacttcaaacagcagttgaaaaacttaccaaaaagctgaaaaaggtaacaacagagttaaattgattttgccgttttacgcaaatttcggtcatgcgccgtttacttcttatcgcttctgtgatagaatgatttttgtagaaacgataaggagtgtctggatgtttttgctctcgttaacaggtgaaactacaaatagtgacatcactataggtttattaatccttgtgatttgtctctgcttgcttgcgcttgtattttttatcataatcaagtcaacaaaaagattccggaattacaggcgaacgaaaagattcgtgaagcgacaggaaaaaaagcacctgaaaagcctccggctgcaatatggcgtatctcatattattacgctcttgtgcctttccggtttgcctattccaaatcgaacaaactgcttccttatgatttctcctcgcggctttttattcgaatattatggcactactttcgagcttccgtatgagaaaatctgtgaagtatatgtaagcggacgcatgaccccgaggcatatgaccaccttaatgtcgtatgaatttatcattacttatctagataataattttgttcaaaaaatacgtcttggttgtccttatcctcaaaaagttgagccatttatcaacgcgttccgatctcagccgcttcgagcttcacaaaacccacaaaattttcagttgtaatgtcaaataacaaaataaggcgcacagaaagatttactttttgtgcgttttatggtagaatgatttgcaataaatgaaaaggggtgtatttatgtcttttgctgctttggctgcaagcgcggcagaaaaaacgtcggaaataccaaagctggaggggctgttccttattcttgtcatcttttgcggggctttgcttgctttgccgattgttctttttattgttcttccaatcatccgcaagtgcaaggcgtcttctaaaaaaaagcaggaaaagctatttcttctcaggcaatacggcgcacagatttcggataaattcacacttttatctggtctccccctctcctccggaaccgtatgtacggttatgattgcgcccaatggatacatattcctgtatgacaacaagacgtatcaactcgcttttgataagattcacgacgtgattctgcacgagaattacaaggaatttttgcagccgtacggattggattcgtctcttcgaattcagtcacagagagtttccagcacttcttacacacttaattttttatacaaggacggtgattttataaacgaaattattttttcatgcccttccaaggcacgaggcgagccttttgcaaacgtgtttaaaagacgttctcgcccacaggaatctgtaattttataaaacctaaactttacggcaccttgctttaaaaaagcagggtgcttttgttttagattttaggaaaggaatgaggctatggcttcaattaattctcagcttcaagcgctgggtggaatgaattcggcattaagtcaaaccaattccaacctcacaaccgctataagtaattttaatcgtttgcagcaggcatccgcagccgccttgaatcctgctgggatcaggccaacctatgcagcttttcagcaaatcaataatgttcttgttttaataaaacaggaaatgaaagaaacgcgagaggaaactgaaaaagagtctaaagaaatcgaaaacaagtttctgactagcctaaataagtgcggagccgccgctaaagtggtttactcaaaaataggagatgctgttaagcagtttgcaactttggaaaacatccaaaaagttgcaaatatttctgattcacttgtaaacagcgaaaaccggctttcccttttagtcgatgacggcggttcagtcgatgcactgcaaagcaaaattttcaattctgcggaatccgcacgcacttcgtatacggatttgatgcagacagtctccaaccttggctttgccgcgggtgacgcctttgccagtaacgacgagatggttgcctttgcagagctgataaacaagggctttgccgtatccggcacggcacccgggaatcaatccggtattatggagcaaatcacacaggcaatggcgggcggcggcctcggggaaagcgacttactttctttggcttccggcgcgcctgcaatcgcctctgccattcagtcgtacatgcagggggccggtgtggaaggaacattgcaggactgggcttcttccggcatgctcaccgccgacgtaatcaaaaacgcgctgttttcggcatcggattccattaacacgcggttttctcagctgccgatgacatggtcgcaaattggcacaagcattcagaatcaagccctcgtcgcctttgaaccggtcttacagaagatcaatgcgttagcgaatagtgaaagtattcagatattcatgaatatcctcacaaatactttttttacactcgcgacagtggtttcaaatgtgttagatatggttgcgggcatcgccgaatttataagtgagaattggtcggatattctcccagtaattacagcaattgtagcagctttgacactttttaccattattttaggtatcgctaaaattgcggagggcgccgcagttttgattgcctatgcacacgcaacagccaaaaggaaggaagtttcagcacaaatggccgctattgccgcacaaaacggttataataccgctttgctcgcctgtccgctaacttggattcttgtgataattctattggtgattgctgcaatctatggtgcggtcgcagcatttaatcatttcacgggatccactgtcagcgcgacgggtattattttcggcgcaattaccacggcggttgctgcgatttggaatatcttcctcgggcttgccgagctcgtcctcggaatcatcagctatctgattaacccgttcattgaattcggcaattttcttgcgaacgtgtttacaaatccggtttcgtcgatcatctacctgtttcagggccttgcggacaatgtgctcggcttcattgaatccatcgcttccgcgctcgatttcgttttcggctcgaatatggcggataccgttgcaagctggcggcgcgagctgaaagcctatgccgacgacgccgtgaaaaaatacgcgccgaacgaaaactacgagcggaaattcgacagcctcgacctgagcatcgacggcatcagcgaagcgctcggcattgatctcaaccgctgggattacagcgacgcgtggaacaccggctacaacgccggcgaggggctggagagcagcatcggcgatatgttcggcggcttctccggcggcgatctttttgacagcagcctgctcgaccccagcgcctatacagccggcagcgcctcgggtctttccggcgggggcgccggccccggcgcctacgacacggggagccttggggcgatttcgggcgacacggcggcaatccgcgagaatacggcgcgctccgaggaggacctaagcctgctgcgcgagatcgccgagcgcgaggccatcaaccgctttacgaccgctgaggtcaaggtggatatgaccggcatgaacaacaccatccattccgacatggacatcgacggctttatcaccgtctttaccgaccgcttcgccgaggcgctcaccgccaccgcagagggggtgcacgtttaatgtaccgcatgtatttcgggaacacactgatgcccgtcgcccccggcgcgctcaagatgaaaattaaaaaccagaacgagacagtctcgcttgtcagcgagggcgagctgaacatcctgaaaagcccgggccttacggagctgagcttcacgctgctcctcccccgcgcgccgtacgccttcgcgctctacgaggacggcttcaagccgcccgatcactttttagcgctctttgaaaagctaaagaccgagcgccgcgccttcgacttcacggtgctgcgccggctcgacagcggcgccgaagcgctttcggagacgaacatgaaatgcgcgctcgaggactacaccgtgagcgagagcgccgaggacggcatggatttttcggtggacgtgacgctccgccaatacgtgccctacggcgtgaaaacgctcgtggtgaagaacaacgaggcgaccgagacgacggaccgagacgcgggcggcaaggagaaaaccgagcgctacaccgtgcgcgacggcgacacgctgtgggacatcgcccgcacggagctcggcgacggcacgcgctggaaggagatctaccagctaaacaaaaaggttctggacgacgaggccagccgccgcggcatgcccgccgaatcaggcagccgctggattttcaccggcaccgtaatccagattccaagctgaaagggggagctgacatggcaaacacagcgacacaggtgcgctgccgcgtctttaagacgaagggcgcgtcggtttccgccaactactcagggcactccggcgtggacgtgaccgccgacggcggcttcgactacgtggtggcccactccgccggggaggtcgtctgggtgcagacgggctacggcaatctaaaaggcagcgagggcgacccctcctacggcaacgccgtgcagctgcgccacgcgaacggctggtgcacgctgtacgcccacatgcgggaggtgaacgtctcctacggccagcaggtgggccgcggcgcggtgctcggctacatgggcgacagcggcaacgcctacggcgcgcacctgcacttcgaggtgcgcaacaccgccaatcaggcgatcggcttcagcgcgcgcgattacctccatgccgacctgcccggccttgcgggcggcggcgcggcggccacggacgcgcaaacgggtgcaggcggcgtggaaatttcgaaggtgacggtcaagacccgcgcgggcgagaccggccgccgccccgaaagcctgctcgggcgcgccgagggcaccggcgcgcagcacgaggtgctcgtgcagcacgaaaaccgcgtgcttgccccggtgctcaccggcagcgtaacgctcgagtggcagcgcaagagcgcgcccggcacgctcgatttcacctgcgccgtcaccgagggcctcgcgctttcggagggcgacgccgtgagcctgcgcgtgaacggcaaaaccgtctttttcggctatatcttcgagaagagccgcagcgggccgtatgaaatcgccgtgaaggcctacgaccagctgcgctacctcaagaacaagggcacgcttgcctacgccggcaagacgtacaccgaggtgctcgagatgatcgcgaaggactgcggcctcacctgcggcacgctcgaggacacgggctacaagctgccccagcgcgtggaggacggcacctatttcgacatgctgctgaacgcttcggacgaaaccgtgctgaacgacggcaagctcttcgtgctctacgacgactgcgggaagctctgcctgcaaagtatcgagcgcatggcggtgccgcttctgctcgacgcggacacggcgggcggcttcagctacaagacctcgattgacagcgacgtgtacacgcgcatcacgctcgcgagcgacaacgacgagaccggcgagcgcgagctgtacgtgcacgacagcggcgcgctgcaatcgaaatggggcgtgctgcaatactacgagagcatgagcggcgcgggcgcagccaagctgcgcgaaacggcgaagctgctcgccggctactacggcaggctgcgccgcacgctgagcctttccggctgcctcggcgacatccgcgtgcgcggcggctcgtcggtcgtcgtgcggtttcgcttcgacgacctctcgctgcaaaactacatggttgtggaaaaggtgaagcacacctttcagaacggcctgcacacgatggacctcgacgtctccggcgtgcggggcgaattcaccgtatgaggaggaaaacgatgacacccaaaacaagcaccgagctgatgcacgatttcaccgtcgtacagcagcccggcaaaacctaccgcatcgaggggaaccgcattgcgggctacacggacggcctgcccgccgtcgtgcaggcggcgcggctgatcctctcgaccgagcgcttcatgcacccgctctacagctggaactacggcgcggagctcaccgatctgttcggcctggcgccgccgctactgcacacgcgcctgcgccagcgcatcaccgaggcgcttttgcaggacgaccgcatccgcgaagtggcggatttttctttttcgcacggccgcggcgccgtggccgttacctgcacggtgaaaaccatttacggaacaacgacgatcacggaggtactgaaccatgtatgaggcactgacctttgaggcgattctcgagcgtatgctcggccgcgtggacgacagctttgacaagcgcgagggctccgtcatttacgacgcgcttgcccccgccgcggtcgagctgcagagcgtctacttcgagctcgaccgcattttgcaggaatcgtttgcggacacgcaaagccgcgactacctgctgcgccgcgcggcggagcgcggcctttccgcaaagcccgcgtcctgcgccgtgcgccgcggcgaattcagcggcgacgtcccgcccggcacgcgtttttcgctcggcgcgctcaactacgtttcgggcgagaaaatcgcggacggcgcgtacaaaatgacctgcgaaacgccgggcgaggccggcaacaccgaccgcggcacgctgctgccgatcgattatgtggacggcctgacacgcgccgagctgaccgacgtcctcgtgcccggcgcggacgccgaggacaccgaggccttccgccgccgctacttcgaatcgctcgaggcacaggcgttcggcggcaacgtagccgattaccgcgagacggtcggcgcgatggagggcgtgggcggcgtaaaggtgctgccggtctggaacggcccgggcaccgtgaaggtgatcttcacggatgcggcgttcggcgcgccggacgcttccgctgtagcggcggtgcaggacgcgctcgacccgcccgcgcggccgggcgccggcgtgggcctcgcgccgattggccatgtggtgaccgtaacgggcgcgaaggcaaggcccgtagccgtctcaacggcgctgaccctctcgggcgactggtcgctcgccgacgtgctgccccgcgccgaggacgcgctcgacgcgtatttttccggccttgcagccgcgtggagcggcagccagacgctcaccgtgcgcgtgagccagatcgaatcgcggcttttggacctcgacggcgtgctggacgcggcggacacaaaattgaacggcgcggcgggcaacctgacgctcgccgacgacgaaattccggtgaggggggaactccatgcgacgcagacttcttgaccggctgccgccggttttacagccgattttggagctgcggcagatcgccgacacggccgagcagccggagttcgacgcgctctggcaggcgctcgaaacgctcctttcaaaccagtttgtcgaaacggcggacgaaagcggcatcgcgcgctttgagcgcgtgctcggcatcaccccgcgcgcggcggccgatctttcggaccgccgctttgccgtcgccgcgcagttcatggagcgccgcccaacgacgctgcgctttctcgagcggcagctcgaagcgctctgcggcgcggacggctacaccctttcgctcgaccccgcggcccgcacgctggcggtgcggctcgcgctctccaaaaaggagcagtaccgcgcggtcgaaaagctgatcgcgcagataaagcccgcgaacatcgcaagcgagctcgacctgctctacaaccggcacagccagtttttcgggcgcaccttcggcgagatggccgcccagacacaccatgcactgaggagtgaggtacaatgaaattaacgaaaaattacggcctgaaaaagccggacggcgaggatttctacaacgtgcaggacttcaacgacaacgccgacgcgatcgacgcggcgcttgccgcaaagcccgatttgcccgcggcggcggagccgggccacttcgccgccttttcggcgggcggcatcgcggacagcggcaaagcggcggcggacttcctgcctgccggtacgacgcccgcggacatcggcgcggcgacggcgcaggcgcattccacgctctccgccgcgcagaacgcgcacgcaaacgacgccgcaaagcacttttccgccgcagagaaagcgaagctgcaaaaggcctacacgaccgacgacattgtcgtgagcagcgcgcagccggccgccgccgagggccggatctggatccggatttgaggtgaacggctatggcaacgagaagctgtacgtataacggcatggccaatttcaacggcggctggtcgccctcgagcggctacagcaaaacgctcgacggctacatcggcgacggcggcggctacggcgtcgcgctgaaattcgcggtcccctccgccccgggcgcggccgccgggcgaagcctgaccatcgcgctcgacctgatgacgctcggctacacgagcctcacactcgaatactgggtgacgaccgcaggccgccccgacggcccgaattacggcggcggcccgccggccgttcagggcacgcagattctgcacggcacgtcggccgtgagcgggctcaacacggcgaactggtcgcgcaagacctttaaaaccggcgcgaccgccgcgctgcccgcgggcggcggcacgtattacctgtggctgcgctgcaaccacaacggcgtcgtgcgcgcctcgacgccggccttcacgctgaactacacggcgcagacgccctgcggcgcgccgacggtcttttcggcatcgccgagcccgttcgagggcagcgtgacgctctcgtggagcggagccgccgccggcacgggcaacgcgatcaccggctacgagctgcaatacgcgacgagcacgaacaacagcgtgtggagcggctggtcggcgttcaagactgtgtccgccgcctccggcagcgcgagtgcggcggacacgccgggcatcgcgcgcggcgcctacgagaagtggcgcgtgcgcacgtgcggcgcggcaggcagcggctattactcgggctggatggaatcgaacagcgtgcggaaaaacagcgcgccggccgctcccgcggcgttctcggcctctcccgcgctgatcgcctcgggcggcagcgtgacgctctcgtggagcggagcctccgacgcggacggcaacatcgcccactacgagctgcaaaagaccgcgaacggcggcgcgtcgtggtcggcggccggcacggcctccggcagcagcaccgctgtgaagctggcggagggcgcgggcgcggcggtgcagttccgcatccgaacggtcgatgcgttcggcatcgcgagcggctggaaaacaagcggcacggtgacggttaattccgcgccatcggccccgacgcaggtttcggcctccgccgccgtgttcggcgcgggcgaccgcatcgccttctcgtggagcggcatggccgacccggacggcaacatcacgcactacatcttgcaggcgcgcaaaaccgcgggcggcacgtggggcgcgtggcaaacgcttgagagcgcgctcaaaacggcagacaccgccctcaccgccgcggagggcgcagcctttacgccggcaaaccacgagaaggtgcaggtgcgcgtctgctgtgtggacgccttcggcctcacgagcggctacacggccggccccgagctgctgcgcgacgacccgaccggcatcaaggtctatgcgggcggcgcgtggaaaaaggggtatgtccatgtgtgccgcggcggaaaatacgtggaatgcacgctgtatgcctgccgcggcggcacgtttgtaaggggggaatgacggatggcgaatctcgtggagcttgtaaagcaggccgcgcttgaggcggtcgccgcggcgcaccccgcgcaggcggtattcggcaaggtcacggacaccgagccgctcgcggtgcgcatccaccagaagctgcggctcacggcggagttcctcgcgctaagcgagaccgtgcggacgaagctcgccgccaaaagcctgcgcccgggcgacacgctgctgcttttgcagcagcagggcgggcagcggttcctcgcgctcgacgtgctgccgggcgcggactggacgccgcccgccgccgcgcccgtcacttgggcggacatcgccggaaagcccgcggccttcccccctgccccacacgcgcacaccgcggcggaggtgggggccgcaccggcggcgcacacgcacacaccggcggagattggcgccgcaccaaaagcgcacgcacatacggcggccgaaatcggagccgcacccgcatcgcacacgcacaccgccgcggaaaccggagccgcaccggccgcgcacacgcatgccgcatccgatattgccgccggtatgcttccgctcgcacgcggcggtacgggcgcggcaagcgccgccgcggcgcgcacgaatctcggcatcacttacagcaatctcggcaccgtgcctgtcgcaaacggcggtacgggggcgacctctgcatccggtgctaggtctggtttgggagtgcccgcagaaatagacatcggagatggttcttctggatttccattcaattggggcacagttatctcccgcggaggtttaggaaatacaataggccaagccaccgccgacaactactattggggagtcgattccaatgctactctttggggaggaaagcagacaaatcgtgctacaagcgttacgtggaaaaaagcgatgatgctcgatgccggggctccggctttgggtgtttcgcagggcggcacaggggcaacgagcgccagcggggcgctttcaaatctcggcgctatgccattaagctatggacagtctgtagcactttggacgggggtatgcaatcgtggaagtagtataactatcccgaacgcgaacaaatacggcgctctgatcgtttactgcacgcccggcagcggtgaatccgaggtaatcacctgtatttacaggggccggggctataaatttcagatcgccagcaatcaggcctactgcctgctttcggctacggacagcggaaacgacaaaatatatacggtcgattccggatcgtcggccggtgccgcactcaagggcgtgtacggtctttccagattcaaggcatagtcagaaaacggagggaatatgaaaatcaacgcgacatttgaccgggagggttatctcgaaaattttgccacgctcggcacggtggacggcggtatggacgtcgaaacgccggaggacgtttccgaagatgagctgatggaaaactacgcggcctaccggctcgaaaacggcgcgctcgtgctcgacgaggctaaactcgccgccatgcaggcagccgcggagcaggcggcgctcacggcgcggtacatcccgtcggaggcgcagtccgcggcagaggccgggcggttggtgctcgcgcagatggccgggctggacgacgatgcgcgcatccgcgtttcggggctgtacgagctgtggatcgctggcaagtacgaggccggcgacatccgcaattccggcgggcagacgtgggaatgcttccaagcgcacgactgcgcggtgtatccggacatcaagcccggctccgatgcgtggttcacgttctggcggcccctgcacgggaaatcgccggagacggcaaggctgttcgtgcctgtgcagggcgcgcacgacatgtacaaaatcggggaatatgcggtgtttgaagatgcgctttacaagtgcgcgcaggacacggcctacagcccggcggactacccgcaggcgtgggaaaaactaaactgaaaacggaggaatttatgagagagaaccttttgaaaagcggcagtgcggcggcaggcgcagcactcgcctcgtatttcggcgcgctggccgcgccgctgctcgttttgctgtgcgtcatggtcgtcgattacgtcaccggcatggcgaaggcctacatggcgtcgcagctcagctcgcgcatcggcctgcggggcatcctcaagaagctgtgctatatggcgatggttgccgtcggcgcggcgctcgactacctcctgaccggcgcgctcgcgcaggcgggcatcgacctgcatgtcgagatgttctgcggcatgctcgttgcggtttggctgattataaacgagctgatctcgatccttgagaacctcgccgagatcggcgtgcccggcatgcccgtcctgacaaagctgatcgaccggctccggagcacgctcgagagcgggaacaaagtcggaaaaaaggaataatatggagggagcacgtaatgaaaaggggggatcaattatgctgcatggattcgacctatcctacgcacaggccggcctttcgctcgctgaaatcgcggacaaggccggctttctcctgctgcgcgccggctacggcggcgactacaaggatcaggacgacagcgaattcggccgcttcgccgaggaggcggacgcgctcggcatcccgtggggcgcgtacctctactcctacgcgctcacggcggcggacgccgaaggcgaagccgcgcacatgctgcgcctgctgggcggccggaagcccgcgctcggcgtgtggctcgacatggaggacgcggacggctacaaggccaaaaacggcatgccgagcgatgccactctggcggacatctgcatcaccttctgtgatgcgatggaacaggcagggctttacaccggcatctacgcgagcctgagctggctcgaaacgaagctgaaaaccgagaagctcggccgcttcgacaagtgggtcgcgcagtggaacgacacctgcgactacaccggcgcgtacagcctctggcagtacaccgaccggtatgaaatcgcgggcagaaagctcgacgcaaaccacctcgtgcgggatttccgcaccgacaaaggagggaattccatggcgaacaaaaagagccgcgtgctgatgaccggcgagaaccagatcacgcaacactacggcagcggcgggcacggcgggtgcgatctcgtgaagaaaaccaaccagctcgatgggattgccgcgcattccgacggcacggtcgtctggtgccagtccggcatcccgaacgatccgggcagcagcggcaaccgctcctacggcaacgccgtgaagctgcgccacgcgaacggctggtgcacactgtacgcgcacatggactatatttccgtggagaacgggcagacggtcaagaaaggccagaagctcggctatatgggcaacaccggcaattcctacggcgcgcacctgcactttgaggtgcgggacaagtccgacgcgcgcgtcaacccggagccgtacctcaacgccgatctgccgggcgcgggcggcggcgcggacacgtccgcaggctataccggcgacctgacctactgcgcctacacgcagaaggcgtggcagccgaaggttgtgaacgccggcgacgggccggacgggtacgcgggtatttacggcagcgcggtgcagggcatccggatcgacgcgaagaactgcgacgtgtactaccgcgtgcacctcaagggcaagccgcaggacgagtggctgccggaggtcaagaacagcggctcgggcgcggacggctatgccggcatctacgggcaggacatcgacggcatccagatccgcgtgccgcagggctttgtagactgccgcgtgcacctcaaggacggcgactacctcgactgggtgcgcttcggctcggcttataaggacggtgccgacggctatgcgggtatcttcggccgcgcgatcgacggcgtgcagatggagtaaaacaggatagaaaaaagggaatccccggatcgggctcgtgcattttttgcgcggcccggttcggggattttttcatttaattgcaaaacaatgttgcaaaacaatgtattataatacagaaagaaaggtgtgcgtatcgcagggcacaaacgacggtaagtgttcggatgaaatcgaccagcggcactgtatgcgaggtaaattttggatgattaaagcgcgggaaaatttcgagtattggatgaagcaggacaaaaagacgctggggcacattttgcagctcttaaaagatattgaccgcaacggatatgaaggaatcggaaaaccggagcggctgaacggcgatttgtccgcttattggagccgcagaatagacgacgtcaaccgcattgtttactgaattgaaaacggtatggccaaaattgtacagagcggctcccattacagggataagtgaagaatacctgcggtgcaccggataaagcaccccgaatcgggctcgtgcattttttgcacggctcgattcggggcgtttttgttttttatgggtgcgggggttactcggtgcgcagcgctgtgaccgggtccttcttcgccgcgcgctttgcgggcagcaggccgccgaccaccgtgatcagcatgctgatcgcgatcaaaatcaccgccgcgccgacaggcagcaccgcgcgcaccgtatcgctgccgacaagctgcgcgatgatcgaattgatcgggatcgtgagcagcgccgagatgccaacgccgatcaggccggcgcagaagccgatgataaacgtctccgcgttgaacacctgcgagatgttgcgcttcgaggcgccgagcgcgcgcaggatgccgatctccttcgtgcgctccagcacggagatgtgcgtgatgatgccgatcatgatgcaggaaacgacgagcgaaaccgcgacgaacgcgatcagcacgtaggagattacatcgacaatcgaggtaatcgaggcggtgagcagcgcgacataatcggtgtaggtgatctggctgtcctcgtccaccgtctcgttataggcctcgatgcagtccgaaacggcctccttgttttcaaagctgtcggtgtagatgctgatggaatccggcgcgtcgtagctgaccttgccgaacgacttcatgttgtcctcaaaggaggccccgtcgatgtattcgtcgtagagcgagacgaggatctcctcgtccggcgtgttctcgagccacgcgtccatggcctcggccatctggctctcgtccatttggcccatgcccatgccgccggcctgcatctgctgcgcctgcgcggcctgtgcgccggcctctgtcccctctgcctccgcattctgcgcgttgtagtagaggatcatcgtgtagagtgaggccttatcggaaacaccgagcttcgagatgtagtccgcggcgtcggcggcctttttcgcgtcgtccgccgcctcaaattccacgccgttgagcacattgatctcgggcgtttccgcctgcgcgcgcacgacggcgctctcgttcgtgtggtcgatcacgtaatccgtgagcttcgatgtgtacgccaccggggcgcgcagcgtcgcgttggccgcgtccgccttcgggcggatcacgccggtgaccttcagctcgagcgcgttttccatgagctgttccgcgccgccgttttcctcctcgatataggtgaacgtgccgtcgtcgttctcctgatagcggtcgcaggccggcacaagccagaagctgcggtccgcggcatcggcgtaatcccaatcaaacgcttccggcgtttcgccgtcctcgatcgccgcgcagaccgcgtcgtattcgtccttcgtgatgaggccgagctggtagagcgtatcggtggggatggaattctgctcgtcgagcacgagcaccacctcgtcgtaattttccggccacgcgccgtagagcaggtcgtagctgtcggtgacgacggggctgacggtgctctccgtgccggccatcagctcctcaaaattttccgcgccgctgtcggagccggtcatcatcgtcatggcgttctgcatgttctggttcatcatggcagtgaagctcgattcatccccgctctccgcgtcctcgccgacgtccacgctcgtattgaccggggcgtcgtccgcgtcgcgcgcgaacacatcgaactggacgttgtacgtatagacgacgccgttttcaccgaggtactgcgcgatctcgctttcggagtcgtcgaggtaatttttaaaggccgtcaggtcgttttcggtgacgctcgactcgagcgtttccacagcctcgagcttccggctgtccgcgtgcacgccgtcctcgggcgcggcgtccgcatcctgcacggcgccgtgcacggctcccatcgcgccctgcgcctccatcagcgccgacatgtcgaaggtttcggccgtgatcgtcagcggataggaggtcatcgtctccttctggatgtctgcgatgtactggttcacgccggtcgaaagcgagaggatcagcgcgatgccgatgatgccgatcgaccccgcgaacgcggtgaggagcgtgcggcccttcttcgtgcgcaggttgttgaagctcaaagagagcgaggtgagaaagcccatggcggcgcgccccatgtttttgtgctccggcgttttgagcgccgcctcgtccaccgcaaaggggtcggaatcgtcggtgattttgccgtcgcgcaggcggacgatgcgcgtggcgtactgctcggcaagctcggggttgtgcgtgaccatgacgaccagccggtccttcgcgaccgccttcaaaagctccatgacctgcacgctcgtctcgctgtcgagcgcgccggtcggctcgtcggccaagagcacgtcggggtcgttgacgagcgcgcgggcgatggcgacgcgctgcatctgcccgcccgaaagctggttcggccgcttgtgcgactgctcgccgaggccgacctcctcgagcgccgcctgcgcgcgctttctgcgctcggcgcgcgaaacgccggagatcgtcagcgcgagctcgacgttcgcgaggatcgtctggtgtgggatcaggttgtagctctgaaacacaaagccgatcgtgtggttgcggtaggaatcccagtcgcggtccttgtactgcttcgtggagatcccgttgatgatgaggtcgccgctgtcgtagcggtcgagcccgccgatgatgttgagcagcgtcgttttgcccgagccgctcgggccgagcacggcgacaaactcgctgtcgcgcaggttgaggctcacgtcccgcagggcgtcctgcacaagctcaccggttttgtattgcttgtggatattcttgacttgcagcatttcatttttctcccttgcgctctgcatcgtttaaattgtcatgcgctttattataggttccgattccgccgccgttatgaacaggatatgagcaaattgtaaataaccgcggcgaggatgcgcccgcggggcaaagccgcccatttccgcggcgcagcgcgcaatccgctggaaaaacgcgcggcggcgtggtacaatgcagatgttaacacgcgttgcttgcggcaacggccggttttcggtatgcttgtgccgggaccaaaaataaaggaggctgacccaaatgctgaatgaaaacatccgggccatcagaaaatcgaaggggctttcccagcaggagcttgccgtgaagctgaacgtggtgcggcagaccgtatcgaagtgggaaacggggctttcagtgcccgattccgacatgctgcttgtcctttcggcggtgctggagacgcccgtgagcacgctgctcggcgaaaccatcgcgccggcggagcccgacggcttaaaggcaatttccgaaaagctggaggtcatcaacttacagcttgccggacgaaaggccgcgcggcggaaaatcctgcacggaacgctgctcgggctgtgcgcggctctgctcgcaattttcgtgctcctcagtgccgtgctcaaaagcccttacttgaactgggactacagcagcccggagaccgccgtcatcggcgtgacgctccacgcgtgcgagtggatttttgtccgggcggctccggttctcctcctcggggccgctatcggcgctttcctgacgcggaagaaggattaacgcttgcatggacggtgtgcccgcggcggcgcgctccacgcaaaaagcccgcacaacgctgtgaagtagtcaatagttagtagacataaaatttcttatgccaccagttctgttctatacgggactggtggttttccttttagtttgcggacgggtcgttcattgttgaaatagtagattgcctgctcaatggtagatctcagatcatcacattcccagtaacggaagtgcttgcgcagcgtgtccttgaatcgcccccaaaagctttccataactgcgttatcgcgagggtttccggcccttgacatactttgaattacattgtattctttaagcaggttacaataacctgcggatgagtactggacaccttggtcgctgtgcaaaaggatttggtgttcggtgctcatttttcttttcagaaggcgctctgccggcttcataacgaggaaattgtcaaaagtatcgctgagttcccattccagaatctcgttgttgaacagatccaaatagcctgcaagataataccacttgccgttatgtttgatataagtaacatccgtcacaatcttctgcatcggcttctctgctttgaattttctgttcagtacgttggcatagcggatgtgttctaagttggttcctgtggccgcagctttcctgcgcctggtgtatccgtgaattctcagtcgcttcattgacttccaaacagtaggatcactgacgatccaaccgaattcaaggtacagcttatccctgatctggcggtatcccatcattgggtggtgggaatggatgtccaggacataactatccagtattttatgtgttttctcataccggtttaactgtcctgctcgcttcaaccacttgtagtagccgctgcgagaaacaccgtagatttcgcaaagttcgctgacagaatgtttgtctgtctgcttttgaatctcagcatacatctctcggatcatctttttcgggcatcgcccccttttcgttcgttccgtttttttaaacgaagtacctccgcctctttcttaaccagctctcgcttcagcagttcgatctggtattgcagctgctcctcgtaggtcagttccttccggcgctcataacgagataaaggattcccgggtttcttcttaacttccagcccggcttcaccttctgctagatactttctggtccactcttgtattaaccgatgactgcatcctgtttctctttcgagcgaccttgaagtttctcctgctaaattcctctttacaatagctaacttttcttctttgcttcgcatcgtgtatttaccagccatattgccacctccatgtctataatagcataaaaataatggtaggcacttttgtgtctaccattattttatcacttcacaacgctgtgcgggctttttcgtcttacgcctgattttactgcgcgcggccgagttcgatggccttgcggttgaagccgagcatatcggccttgcgggccgggatgcacttctgaagcgccttgtcgagcgtttcctcggcgcagaagccgacctccttgaagagcttgccgatgaggatgatgttcgcgaggcccttgaggccgttttcctcggcgagcttcgaggccggtacgtagtaggttgtcacgtcgtcccgctccacctttacgtcgatgaggctgctgtcgagcagaatcacgccgccgggctcgacgtcgttcacaaacttatcgagcgaggggcggttcatcgcgacgagcacgttcgggttcgtcacgagcggcgagccgatcgcctcgtccgaaaggcagacgctgcagttcgcggtgccgccgcgcatttccgggccgtaggaggggagccacgaaagctctctgccctcgatgagaccggcataggcgacgaccttgccggcaaacagaacgccctgaccgccgaagccggcgaaaaccatgttcagatccttcatttcagtctgtcccccttcgtgccgtccttgaatacgccgagcggataatacggaagcatgttttcccgcagccagccgagcgcgtcgaccggcgacataccccagttcgtcgggcaggtggagagcacctcgacgatcgagtagcccttgccctcgagctggttctggaacgccttcttgatcgccttcttcgcgatgttgacgtttttcacgctgtccaccgtgacgcgctgcgcgagcgcgacgccgtcgagcgtggagagcatctcgcagacgcgcaccgggtagccggcggtgttcacatcgcggccgtagggcgtggtctgcgtgacctgattcggcagggaggtcggggccatctggccgccggtcatgccatagatcgcgttgttgacaaagatgaccgtgatgttctcgcctctcgtcgccgcgtgcacggtttccgccgtgccgatcgccgcgaggtcgccgtcgccctgataggtgaagatcacgttctcgggcttcgcgcgcttgaggccggtggcgaccgcctgcgctctgccgtgcggcgcctgcaccatatcgcaggtgaaataatcgtaacacataaccgagcagccgaccgacgccacgccgaccgttctgccctcaacgcccagctcctcaatggcttccgcaacaaggcggtgaatgatgccgtgtgtgcagccggggcaataatgcagcggcgcatccgtcaaggtggacggtttcttaaatactactgccattttattccagtcctttcgccttatttcaggagtttcttgatttcgccgagcacttccttcggcgtggggatgatgccgcccgtgcggccgtagaaatggaccggcacggcgcagttcgcggcgagacggacgtcgtcgaccatctggcccatgctcatctccacgacgagaagctgcttcgcctgctttgccgcgcgctgcaccgcgtccgccgggaacggccagagcgtgatcgggcggacgaggccaaccttgaggccctcctcgcgcgccttattgacggcgcttctcgcgacacggctcgacgcgccgtaggcgacgacgatcaggtcggcgtcctcggtgcggtactcctccgcgcgctgctcgttcgccttgatcgtctcgtagcgggcatagcgctcgcgcacgagatcctcgagggcgttcggcgtcagataaagcgaattgacgatgttatgcttgcgcttgccgccgtggccgcaggctgcccacggcttatcggccgcggcctgcgccgatttttccggcagctcgaccggctccatcatctggccgagcatgccgtcggcgaggatcatcgcgggcatgcggtactggtcggccttgtcgaacgcgtcggagacgaggttgaccatctcctgcaccgtggacggcgcaaagacgagaatctggaaatcgccgtggccgagcgccttcgtcgcctgccagtagtccgcctgcgagggctgaatgccgccgaggcccgggccgccgcgctgcacgttgatgatgacggccggcaggtcggagcccgccatgtaggagatgccctcgcccttcaggctgatgccgggggagctggaggaggtcatcgcgcgcacgccggccgcagccgcgccgagcaccatgttgacggcggcgatttccgactccgcctgcagatatgtaccgccgattttcggcatgcgctttgccatataggcggcaagctctgtctgcggtgtgatgggatagccgaagaagtggtggcagcccgcctggattgcggcctcggcgagcgcctcgttgcccttcatcaaaaccttttctgccataaatgaaacattcctttccctgttagcgttcaactgtaattgccgtatcggggcacatggtggcgcacgccgcgcagccgacgcaggccgcctcgtcgatgagctgcgccgggtggtaacccttcgcattcaggcggtccttcgcgagcgcgatgattttcttcggacatgcgttgatgcacatggagcagcccttgcacactttttcgtccacaataatccttgccatcgtttttcctcctagttaaaaatccgcttcgtcctcccagacgaagtgcacatatctccgaacgaccttgaagcccgcgggcgtttcctccccggccgcaaaatccggaactgtcgaatacagaagcggcaggccgcacagccgcgccgattcctcggcaaagcccacggcggcccgcaccgtctcaagcgtcgtatccacgccgaggtgcgagttgttgacgaccgccgtcgcctttaaatgcgacgcgccctcgatttcgcgcagcagcggcagcgtttcctccggctttgtcgaaaggatgcggtagcggttcacgacgtagagcatctcgtagccggcagcttcgagctcgcggctgatgcgcccgagcgccgtcgcgccgacgtcgtcgccgcccgcgtcgatgaacacgtccgtgtcctccatgctgaagatcgagtagatctccggcgggagcaccggggtgtcgagcgtcgtgtttgcaaagacgggcgcgatgagctgcacgccgtgccgctcgagaaaagcgccgtattccgaggagcggaagtacgggttgacgatgtccatatcgacgatgacgctgcgccgcccctttgcagccgcctcggccgcgaggttcagcgcgaggttcgtttttccgcagccgtaatgcccgcagaccaccgtaatcctgctgttcatccgttcacgcccttcctgaaatttccgcgcgggcacagcggcgcctgcacgctctaatatgataccaccttcggcgggaaaaatcaaccgctttggcggcggaatccgacatttttgcatgtcagaacagtatatccttcaaatttccagttttggaagcagttttcgcgcagtacggcgaagccttccgcaccgccgcggcgcgcgctttcctcctcctgcaagccatcgcgccgtgacctgcacgccgggcgcacggctgcggcggaggcacacgcccatgtgcccgcgggcggcaaagcaaacacgcttgtccccgcccacgcgcggcgtgaaccaaagatacctatttgctgacaaaagcgccgtacttgtccccgcccacgcgcggcgtgaacagcggatggcgtatgccgcacctttccccgcacttgcggcctccctatgcgcgccatggacggcagaactgttcggcgcatgaacggtgatcggccggtgacagcacgcagacgcgtaatttttctcgaaagccgcgtgcttgcggccatgcgaagtgcctgcgtgtgcgcgcccatgcgcgccttgggcggcggcaaactgggcggcgcaaacggccgcgcttgcaggcggcggggaaaatcctgcaaaaaaagccgtgaacccatgggttcacggctttttggagcggacgacgaggctcgaactcgctacctccaccttggcaaggtggcgctctaccagatgagctacgtccgcatattcggtttcgtttcggaacgttgtctattatagcgtgttcccccgcatttgtcaagcggaattttaattttctctgacttttttcgcgggcggttgcatccggcggccaaagccgctataatgggtgttgcaaaagccggcgcgctcgcggcggcgcggaacccgccgccatgggcccgcgccatttccggcgcaaatcttcttgaaaaggtgattgtatgtattgtaagaaatgcggcagctctatgccggaaaacacggtgcgctgccccgcctgcggcgcgccgtccatctctgtgggcgcggcggactacaccgcgcagtacgacccgcgcgacatcgaggacaaccgcgttttcgcggcgctctcctacctcgggctcctgatcctcatcccgatcttctgcgcgcggcgctcctacttcgcgcgctttcacgcgaatcaggggctgatcctgctattgtgcacggtggcctatacggtcgtgacgcgcatcgtcacccgcgtgctcgacatcctcttcggcggcttcctctcgattatcccgggcgcgttttcgctcgtgacgaccgcgctcggcatcttcttcttcgtcctgctgattctcggcgtcgtcaacgccgcgaccggccgggcgcgcgagctgccgctcatcggccgcttccgccttctgcggtaatttccgccgtctcaaaaagcgcttcccgctgcgggacgcgcttttttctgtggattttcgcggcctcacgattcccgcttcacgtcgccgcggccgacagcgacgcggtagccggcgctttcaatgcggcggcgcagacagccgatacactgcgcggcctcctcgccggtgcagatcttgttctcgtagagcgcgtagagcgcgcgcacgtcggtcggcgacaggttcggcatgacgacgttcgcgcccgccttgaggcccatctcgcggccctcggggtgaatcgtgccgagcgccgtcgtcgcgggcagcagcgcgtgcgggaacatcaggcgcaaaacggcaatcagccgcagcgtcagcgcaagcgagccgtttttctgcccggcaaacggcgtttctgcgtgcgtgatgtacggcccgatgccgatcatatccggcctaagccgctgcagaaagcgcaggtcggcgacgaggttttccacggtctggtacggcgagccgaccatgaagccggagccaacctgatagccgatcgcctttaagtcaaacaggcaggcctgccgcgccgcggcgctgagcgaggccggatgcaggcggccgtagtgcccggggtcggccgtctcgtggcgcagcaggtagcgctcggcgccggcctcgaacaggcgcttgtagctttcgtgcgagcgctcgccgaccgagagcgtgaccgcgcagtccgggtggtttttccggatcgccgaaacgaccgcgcagagccggtcgtcggtaaaatacgggtcctccccgccctgcaggacgaacgtgcgaaagccgagcgcgtagccctccgcacagcaggcgaggatctgcgcctgcgtcaggcggtagcgctcggcgcggctgttgctgcgccggatgccgcagtaatagcagtcgtttttgcagtagtttgtgaactcgatcagcccgcggatgtacacgtccgcgccgtagcgcgcgcggcgcacacggtcggccgcctcgaacagctcggcgtcccacgcgtcggccgcaagcagcgcgcagaactgctcgtccgtgaggtcgcgccgttcggcgagctgctttacaaggttttccatatcgctttgcattccccttccccaaatcctatttattcgatatgctttattgtacacgcttcccgcgcggctgtcaagcggcgggcaggttgcggcacacggcgtagacgagcgcggcgcagagcacggcggaccagagcaccaccgcccagcgccggtaaagcagcggcggctttccctttatgtagcgcacggcctctaaaacgagccacacgccggcggccggcaggaaaaagagcatgaatgggttcagccggagcgccgccgcgaaatcgaggctgagcagcgccgccatcatgcgcgtcgtgccgcaggccgggcacaaaaggccggtggcgctgcggatcaggcacggcggctgcaaaaggagcaggaaagcgccggccgccagcagcaaaatcgcgagccgcgcgaccgaaaaaatgcgctgttttttcgttttcatggattttcccccgctttccgcttgcaatttttccaagcactgcctataattatacttgggtgattgtgcacagtcaacccaatcattctcaaggaggaattacgatgaattcaggttatctcggcgacaagacgccgaagctcggcttcggcctgatgcgcctgccgatgctcggcgacgagattgacatggagcaggtcaagtcgatggtggacaaatttatggaaaagggcttcacctatttcgacacggcctacgtgtacatcaacggcaaaagcgaggtggcggcgcgcgaggcgatcgtcaagcgctacccgcgcgacagcttcacgctcgccacgaagctcccgctgtgggacgaggtggaaaccgaagccgacatgcagaagatctttgacgaatcgatggcgcgcgcgggcgtggaatatttcgactactacctgctgcacgcgatggacaaggcgaaattcgagaaggccgaccgcatcggcgcgtgggatttcatcttcaagatgaaggccgagggcaagatccgccactgcggcttctcgttccacgacagcgccgaggtgctcgacgaggcgctgacgaagcaccccgaggccgagttcgtccagcttcagatcaattacgcggactgggagaacgacaacgtgcagtcgcgcaaatgctatgaggtggccttaaaacacaacaagccgatcgtcatcatggagcccgtgaagggcggctcgctcgcggcgatggtgcccgaggtgcaggacatgatgaaggctgaaaacccggatctttcgatcccctcgtgggcgatccgctactgcgcgggcctcgacaacatcatcgcggtgctttccggcatgtccacgcaggcgcagctcgacgataacgtttcctacatggagcatttcgagccgctcagcgagaaggaacacgcggtgctcgaccgcgccgtgcaggtgctgaaatcgatcccgaccgtgccgtgcaccgcctgccgctactgcgtggacgactgcccgatgcacatcaacatcccggagatcttcaaggcgctgaacggctacaagcagttcggatgtctcgagggcacggacaagccctacaacatgggccagtacgcaaacgcgacaaaggacggcggcaaggccggcgaatgcctgcagtgcggctcgtgcgaggcgcactgtccgcagcacatctcgatcatcgaagagctgaaagcggcggccgcggcctacggcgaataagcgcgggacaagtaaagaacagagaaagggagcttccggcagaaccggaggctccctttttgcgccggcgggcgctcagaatacaaagcattcgatgccccgccggcggcagcatcttttgatgaaccgcgcctgccagccctttttctcgaccatataaacacagtcgcactgctcgataaaccggcggcggcgcgcctttagcgcacggcagtacgcccagtcgccgagttcctccgacggcagaggctccgcaaacgtgcgcaggtcgcggccgctttcctccgcccagcgcgcgccgaccgggttgctgccgtcggcaatgtcggtgacgaccacatgcaggttcttaaaaaacagatccgctataaaattaagcagggcgagatgactttcggcatcgagcgtgctgcggctgagcctccccacaacgccgatgcacagaacctcttcatctctcatggctttctgctctccggcaccgcatggcataccacctgcccgcgccgccaatacagcttttcccgcctgcacggcatggtgaacggcaccgctacggcgcacggcgtgccgttgatccggcagtgcgccgcggcctcgcgcccgtttctcgtgcagccgtcccaaaacaggacgacaaggtcgcagtaccgggcgaacgcttcgccgccgcaggccggcggcagaaagcccccgcagaacgcgggcggcggcgcaatgcaccgaaacggcaggccgcgccgcacgcaccagtcgcggacgggtttgccgagaccgtccgcatcgcagacgatctcgaggtttttaaagcgcaggccgcgcagaaccctgtcgagtatttcatcattgacacagccgtaatgcgcggtaagaattccgagtttcatagcgcccacacccctatttagcctcaaaacgcatctattttagatatattttggaagtaatttaaaacgattttacatctattcaggacacagcaggtgaaatttaatgtaaaattatgtcaaaatacgtttaaaggggcttcacaatggctgtaaaaaccttttcaatccgcatagattccgatacgctcgataagctgcactatatcgccaattacgaggggcgcagcgcgagcgggcaaatacttcaaatgatcaaagtcatgatccgcgagtttgaggaggagcacggcacaattgactttaagcgcaaagcgaagtgacggcgcgctttgtcagggacgatgtggaaaatttgcacgctgttttttcgcctgccgctccggtgctctatactcttttgcagagactatccaaaaaactgcgggaggccgaacatgaaagacaaaaaaaccgttgtgctcgatttgaccggctgcaagtccctcggcgaaatgcacctgcgcatccgcgacgctttccgcttccccgatttttacgggcagaactgggacgcgttctgggatttgatgcgcaccgaatgcgacgcggagcgcatcgtcgtgcgcggccgcgatactgtgccgaaaaacctcgccccgagcgttgaaacgctgttcaggctgttgtacacggccgacggctacttcacacaggtcatcggccgcgccggcatcgaaattctggacgaatctccgccggccgacgacgaagaggacgggcgcacggaggccgaaaaaaacgttgtgctcgatttgaccgggtgcaagtccctcggcgaaatgcacctgcgcatccgcgacgcctttcacttccccgatttttacgggcagaactgggacgcgttctgggatttgatacgcaccgaatgcgatgcggagcgcatcgtcgtgcgcggcggcaataccgtgccgcaggacctcgccccgagcgtcgagatgctgtacaggctgctgcgcgaagccaacgacgacggcgcgcggtacggcgaacaggccgagctggaaattcaggggtgacgttcgcagcatggcttttgcctgctccgcggtacaggcaaaatttcagcgaaactgcgcctgactgcttttacaatccccaaagctgtgctatactgtaggtaaagaggggcggatggattgtgaacgagacatggtcggcgctgaataaaacgatgcaggcacaaatcaaagggaaagatacctttgaagcgggtctgaacacactgtttgacctgcggaagcagttgatggaagtgctgaccgcattgcgtgcggaattgagcagaaaagattttaacgcaatcccattcaaaaatgccggcggctaccacagcaaaacgattgcctattccatttggcatattttccgtatagaagatattgttgcacacacgctgatcgacggaagcgagcaggtgtttttttcgggcaattatcgggcgcgcatccattcccctataatcacgacgggaaatgagcttgtaaaagagcagatagcagatttttcaaagcagctggatttaaacgagctttacgcctatatttttgaggtaaaggacagcaccgagcagatactcgggcgcttatcctgcgacgcactgaaaaggaaaataccggaggaaagaaaagaagcgctgaagtccttgaacgtcgtgagcgaggatgaaaacgcggtctggcttccagcgtattggtgcggcaaagatattcggggcttgatacaaatgccgttttcaaggcattggatcatgcacatcgaagcaagcctgcgcataaaaaacaagatccacccataggtgcaaatccggcctgccgcagatcaccggacgaagccgacaaaaaagggcgctcccacggcgggaagcgccctctttttcatccaatttctatccgattttatccgatttccagcttcggcacgcgctgcatgcacgcttcgatcgccgcgcggtccggcagggcggggatcgcgcccttcttcgtcgcgcagaccgagcccgcggcgtttgcgaaatccgccgccgcgcacagcgcatcgagcgagagcgccgcaaccggctgcccggcctcgatcagcttcgtgaggaacgcgccgaagaagctgtcgcccgatccggtcgtatcgacgaccttcgtgtcgtaggtggataattcccgcatgcccgcgggcgtgcacacagcgcagccccttgcgccgcgcgtaacgacggccgccttcacgccgcgcgcgaacagcgccccggccccggccgcgatctccgcgcagtccgtcagcatttcgagctcctcgtccgagaccttcaccacgtctgcgagcggcagcaggctctgcatcgcccgcacgccggtctcgcggtccggccagagcggcgcgcgccagttcgggtcgtacgcggtgatcacgccgtgcgcccgcgcgtattcggcgatctgcggcaccgccgtgcgcccgggctcagccgtgagcagcagcgaaccgaagcacagcaccttcgcgcccccgagcagtgccttatcgacctcctcgaagcgcagctgcgtatcggcgccgggattgcggtaaaagctgaaatcgcggtcgccgctttccgaaagctgcacgaaggcgagcgacgtggcggtttccgccgaaaagagcaggttcgaggcgtttacgccgttctgctcgagcgtctgcttcaaaaacgcgccgaacatatcgcgccccaccttgccgatgaagcccgaggagacgccgagccgcgccgcctgcaccgcaacgttcgccggcgcgccgccggggttctgctcgaacatcgggatgcccgccgcggttttgccggcgggggtgaaatcgatcagcatttcgccgagcgagagaaaatctgccatggtggtccttcccctttctatggataaaagcgttttatacgagcgccgcgcggacgaagggcccgggcggcgcgtctttttagcttacagaatgccctcgccgaggcacttgagcacgaactcgctgaacagcgaattcgaccacgcgaaccacgggcgggtgaacttcgccgggtcgtccttgtggaagccctcgtgcatgaagccggtgccggcgtcggtcgaggtgagcatctcgagcagcgcgcggcactcctcggggtcggtgctcgtgaggccctgcatcgaaagcgcgatgtgccagatgtagtccttcggcgtgtgcgggctgccgacgcccttcgccgccgtgccctcgtaatagaacgggttctcgcggctcagcacataggcgcgcgtgtttttgtacgtctcgtcgtcggcgctgcagtagccgaggtacgggatggagagcaggctcggcacattcgcgtcgtccatatacgtatagttgccgaggccgtccgtctcgtagacgtacatgcggccgaacttcgggtggttgacgacgccgtgcttttcgatgcccgcgcggatctcggccgaaagctcctcggcgcgctcggcgagcagctcgtccttgtacacgtcgcgcatgatctccgccgtgtagccgagcgtgacgaccgcgaacatgttcgccggcacaagatagccgtaaacgcacgcgtcgtcgctcgggcggaagcccgaccaagtcatgcccgtcacgccgaccggcgcgccgtggccctcgtgcgagagcgtatccgtctcggggcagtggatgcggtggaagaagtacggcgaatcgttgtggttctgctcgcgctggaacgtgtcgagaatcagcttcgtgctctctctgtactgctcgtcgaactgcgcggtgcggcccgtctccttccagaacaggtacgcgagctgcaccgggtagcagagcgagtcgatctcatacttgcgctcccagacccaagggctgacaaaatcggtgctgtcgatttcgagctcgtcctcgctgcggtcggggaagatttcgcgcgcatacttcggccacgtgcggccgttcggctcgatgttgaacgcgttcgcgtaggggtcgagcgcgatgcacttgaactggcggcggatcagcccctcgatgcagtcggcggcctccgcgtcgtgctttgcgaccggcaggtaatggcgcacctgcgcggtggaatcgcgcagccacatggccgggatgtcgccggtgatgacgaaggtgtccttttcgccgagcattttcacggtggtgtccatcgtgttcgggtagcagttttcaaacagcttcttgagcttttcattgcccgcgagcctttcggcggcgcgcttcatttccagatcgattgctttcataacaggatgctccttatcgtgtattttcgtgcgtgcaatttatgtatgcggtttccggccggctcacaggctccacaggaaatccgccgcaaggtcgaaccacttcgcgtttttcggcagaagctgcgtctcgctgttcgaggtgacgcggtcgcacagcgagagaccgtgcccgcccgcggggaacatgtggaactcggttttcacgccggctttttgcagcgccgagacgaacagcagcgcgttttccaccggcacgcagtcatcgggctgggtgtgccagataaaggtgggcggcgtgtcctgcgtgacggaattctcgagcgagaggctctcccgctccgccgcacaacgatcgccgagcaggcactcgaaagaaccctcgtgcgcgtgcggccccgcggtgatcacggggtacgagagcacctgcccgttcgggcggagccgtgcggcgtcgcagccgagcgcctcggccacaaacggccggttccagaaattgccgtagctcgccgcgaggtgcccgccggcggagaagccgatcagaaagacccggtcggggtcgcagccgtactgcacgcccgtctcgcgcacgtagcgcacggcggacgcgacctcgagcagggcggtcgggaagcgcgccggcgcgaccgaatagcgcacgacgacggcgttcatgcccgcggcgttcaggcgcagagcgatcggctcggcctcgcggtcgctcgtgaaggcgtagccgccgcccgggcagacgatgaccgtgggccgcttctgcaccggcacctcgggagaaaggtcgagaaaatacgtgtacatggcggccgacggcgcagagcccgcggcgttcagcctgattttttcatgcgtcatggaaatcaccattcctttattttttgtgccggtcggcaaagccgattgccgctttgctcgccgcggcaaaggcacaaatagtatgtgaaaaagtgtttttcacactaaaagctccttttggtataccttactgccttttagtataccagcactttcctttttgtgcaatcccttttaaaaataacacggggcctctccgcagcagcagagaggccccgtagaggactgttatgaaattcccggatgaattacttgccgaagtatctcttgaggaggccggcgaaagccttgccgtggcgggcttcgtcgcgcgccatctcgtggacggtgtcgtgaatcgcatcgaggttcgcagcctttgcgcgcttcgcaaggtcaaacttgccggcagttgcgccgttctcggcctccacgcgcatctcgaggttcttcttcgtgctgtcggtgacgacctcgccgagcagctccgcaaacttcgcggcgtgctccgcctcttcgtaagcggccttctcccagtacaggccgatctccgggtagccctcgcggtgcgcgacgcgcgccatcgcaagatacatgccgacttccgtgcactcgccctggaagttcgcgcgcaggtcggcgaggatgtcctcgctgacgccctgtgcgacgccgacgacgtgctcggccgcccagctcatttcctcatcctgcttctggaacttcgaggccggcgccttgcagaccgggcagaactcgggggcagcgtcgccctcataaacataaccgcataccatacatacatactttgccatttttaaatcctccaatacaaattttattcggcggcgggcgccgcctttttttgacaatcggggcagatgccgttgaaaagaatgtcctcgctttgaatcaagaggctgtatctttcctcgagcgccgccacggtttcttcctcgacaagcggctcgaaaatatcgagcacccggccgcaggcgctgcacacaaagtggctgtgcctcgagacatccgcatcaaaatgctcctgcccgttgatcacgccgacgcggcgcatctttccggattcgcagaactttttgagattgcggtaaaccgtgccgagactgagatcggggtaatcgggctttagcgcctcatacacccattccgccgtcgggtgcaccttcgtcgcgcacacaacgtcgtagatcgccgctcgtttccggctaaaattctcgcgcactgccattggtcgcctcctccctgccgttctccggcttgttgagcttattatagcacgcatccacgcgtttgtaaataggaataattatcatttttattttctttttgtaaacaatttgtgaacggacaaatttccgccgcttctagcgcgggcgcggcgcgcataggtatgcgcaggaggtgtccgtatgctgtggggaatctttgaatatatctcgtcactgctgttcttttttctgcacgtcacaagcagcggctcgtttccgaaggcgctttcaaaggccgaggagacgcgctgccttgagcagatggccgccggcgaccgggccgcgcgccagaagctcatcgagcacaacctgcgccttgtggcgcacatcacgaaaaaatatttcgccgatgaaaacgaccgcgacgaccttgtgtcgatcggcacgatcggcctgatcaaggcggtcgacagctttaagcccgaccgcggcatccgcctttcaagctacgcctcgcggtgcattgaaaacgagattctgatgtttttccgcggggcgaaaaaggcggcgcagaacatctcgctgaacgagccgatcgacacggataaggacggcaacacgctgacactgctcgacacgatggcgaccgacgacaacatcctcgaggacatcgacctgcgcatgaaaacgcgccggctgtacgacgtgctcgggcgtgtgctctcgccgcgcgaaagggagatcatcgtgctgcgctacggcctttccggccagcgcccgctcgtgcagcgcgaggtggcgaaaaagctgcgcatctcgcgcagctacatctcccgcctcgagaaaaaggcgctcgaaaagctgcgcgggcagttcggcgataccgattacttttcgaggtagcgccggatctcctcgagaaacacctgcccgtagcgcgcggccttgcgctcgcccacgcccgaaacctgcaaaaattcctgttcggtctgcggctttttcgcacacatatcgcgcagggcggcgtctgtaaacacaacgtaggcgggcacgccggccgccgccgcgagcgagccgcgcagctttttgagcagggcgaacagcgcggggtccggcgcctcaagcccggcctgcgcggccttcggcctttcgggcgccaccggcacgcgcatctcgaatttctgcttgccgagcagaatcccgcgcgccgcaggcgcgagccgcagcgtggggtactgcccctcggtctgcaccaaaacgccctgcacgaggagcgcgtcgagcaggcggcgcacctcccagtcctttttctcgcgcatcaggccgtaggtagactgcttctcgagccccgcgcgcagcactctttcgttctcgctgccgcgcaggacgtcggcgatcatggcgcgcccgaagcgctggcccgtgcgcgccacgcaggagagcacctgctgcgccggcacggtggcgtcgatcaccgcggagccggcggcgcagctcgagcagttgccgcagtattccccggcctgctcgccgaagtagcgcaggatgaacgcacgcaggcagtccgccgtcgtgcagtagaacgtcatctggcgcaggcggtcgtactcgcgtttctgcaccgtctcctgcatctcggcgtcgagctccgcgttcggctcgctgttttcgatcaagaagcggttcgtgcgcacgtcctgcgggctgtagagcagaatgcagtccgcggggctgccgtcgcgcccggcgcggcccgcctcctgatagtagctctcgaggttcttcggcatgttgtagtggatgacgaacgcgacgttcgatttatcgatgcccatgccgaacgcgttcgtcgccaccatcacgctcctgcggtcaaagacgaaatcctcctgattccggcggcgctcgtcctccgaaagcccggcgtggtagcgcgtggcggcaaagcccttatcgcgcaggagcgcctcgacctcctcgacggccttgcgcgtcgcgcagtagacgatgccgcatttctcccgccgctcctcgagcaaagcgagcagcgcgagctgcttgctgtgcggcgcctgcacgccgaagtagaggttcggccggtcgaagccggtcgtgacgcgcacgggctccctgagctcgagcagcgcggccatatcggcgcgcaccgcctttgtcgccgtggctgtgaacgcaccgacgacgggccgctccgaaagcgacgccacgaactcggcgatacgcaggtaatccggcctaaaatcctgcccccactgggagacgcagtgcgcctcgtccaccgcgacgagcgagattttgagccgcgcgcacacggcccggaagccctcggtggagagccgctcgggcgcggcgtagatgatcttatacgcgccgctctccgcgttttgcagcgcccgggcgtactgcgcgggcgtcagcgtgctgttgaggtacgccgccctgacgccggcctgcgtcagcgcctcgacctgatcctgcatcaaggagatcagcggcgagatcacgagcgtgacgcccggcagcagcagcgcgggcacctgatagcagatcgatttgcccgcgccggtcggcatcacgcagagcgcgtcgcgcccggaaatcagcgcgtccacgatcgtctcctgcccggtgcgaaacgccgtgtagccgaagtaccggcgcagcacctcgaatttttcgtcctgccctgccctgttttccaaatccatgcgccccttcctttcttccccgccccaagcgcgggcggctgccgcccgaaaaaatacccgcacaggctccggcccgggcgggtgtttgtatagtgatttattttcacagacggcaactccggagcgcgccgccctgttttatccgatgtgcagcaccgcgcaggcgatctggaagtaaatcagcagcgacagcgcatcgacgatggttgtgatgaacgggctcgccatgaccgccgggtcgaacccgatgcgcttcgccgcgagcggcagcacgcagccgacgagctttgcgacgagcacggtgagcacgagcgtggagcacaccacgacggcgacgccggtctccacgcggtcgatgaagagcagcttcacaaaattcgccgccgcgagcgtcacgccgcagagcacggccacgcgcacctctttccagatgatgcgccacacgtcgcggtactcgatttccccgagcgagagaccgcgcacgaccgagaccgaggcctgactgccggcgtttccgccggtatccatcagcatcgggatgaagcccgtgagcaccaccgaggcggcgagcgcatcctcaaacgaattgatgatgctgcccgtgaacgtggcggagatcatcagaagcagaagccacgggatgcgctttttccatgtcgcgataacgccggtgcgcatgtaggggcggtccgtcggcgtgatggcggccatgacctcgatgtcctcggtcgcctcgtcctgcaaaacgtcgatcgcgtcgtcgaccgtgacgatgccgacgaggcgcttttcgttgtcgacgaccggcacggcgaggaaatcgtacttgccgaacagcgcggcgacctcctccttatcggtccgcgtggagacgtagatgacattcgtctccatgatgttgcgcagcacctcggttttcggcgcgaggagcaggtccttgaccgtcacgataccctttaacatgcggtggccgtccgtgacgtaacaggtgtagatcgtctccgtctccacgccgatgcggcggatgcggtcgaacgcctcctccaccgtcatgctgcgcttcaggtccacgtactccatcgtcataatggagccggcgctgtccttcgggtaattcaaaatctggttgatggagcggcgcgtctcgtcgtcggtgtggcgcaggatgcgcttgacgaggctggccggcatctcctcgatgatatcgacgacatcgtcgacatacagctcgttgacgacgtcgtgcagctccttctcgctgaacgcctcaacgagcacgctctgctcgtcggaatccatgtacgagaaggcctccgccgcaagctctttcgggagcaggcggaacacgagcgccattttttcgcgcggcagatcctcgaagagctccgccacgtcggcggggttcatctccttgaggagcgcgcccagcgccggaaattccttttgttccaacagttctaagattttttcaagcatgattcgtccgtcctttctctgcatttttgcaaaaatcggcaagccgaacgatgcggtttggaaccagccgcggggcggccgtcaagcgggcgcagcgaggccccgaacgcgcgccgtgcgcgccggtggctcagccgcagagggcctgcgcccatttaccggccgtataaaaacaggtgaagaaaattcgcctgtttctgctttgagggcggctgcatccgttctcgtggaaccgcaccgccgctactgccagcgtccattttcttcactcctttgctttgttttgccgcgccgcttccgggcgctgtcctttataaagttacccttttttcgtcccgttgtcaaccccggaggcaaagactttttccggattttacattccgacgaaaatcttacacatttcgccgcggatttgccgtttgacgcagacccgcgccggtgcgaaagcgccccatttcacgccttctgccgcatagccccgcgccgcgcaggggcaaaaccctcggcgaaatacaggccgcgtacaggggaacaaggccgtgaagcgatccctcggcaggccggaaaccgctgccggcccgcgcgcggggaacagggccgcacacccgcgcacgcagacagaacagcctgcggccgacgctctgtgccgcggacaaggccgtgcacacgcaaagcggaccgcgccgcaaagccgcgggcgcggtccgttcacgcctatttcggttttaccgctccgcgttcgagccgcgcttcgcgatcgcctcccacaggccgttcaggtaagcggcgccgagggcgcggtcgtagaggccgtagccggcgcggcccgtctcgccccagatcatgcggccgtggtcgggccggatatagccgttaaagccgtttttatagagcgcattcaagatagcgtacatatcgagcgaaccgcacttcgagaggtgcgcgcgctcctcaaagccgttttcgagcacggcgacgttccgcgcgtgcacgaaatggatgcgccccatcgccgcgtatttcgccgccatgtgcgcgacgtcgttctgcgcgctgcacccgagcgagccggtgcagagcgtgatgccgttgtgcgggtcatcgacgatcttcaaaaagcggtcgagattcttttcgcaggtgatgatgcgcggcaggccgaagatgctccagcacgggtcgtcctcgtggatcgccatgttcacgccgcacgcggccgccaccgggatgatgcgctcgaggaaatacgtgaggttcgcccagagatcctcctcggtcatcgcgttgtattcggcgacaaccgccttcagctcctcgcgcgtgtagctcgcgtcccagccgggcagcgtcaggtcgctgtcgctctcaagcgggttcacggcctcgacctgttccttataatagacgaggctcgtcgagccgtcgggcagcttatggtcgagctgcgtgcgcgtccagtcaaagaccggcatgaagttgtagcagatgcagcggatgcccgcctctgccaagcggcggatgttctcacagtagttctcgatgtaccgctcgcgcgcgggcttgccgagcttgatgacctcgtgcacgggcacgctctcgatcacctcgaagagaaggcccgcgtcctccacctgctttttcagcgccgcaatgctctcgcggctccacacctcgcccgcaggcacgtcgtacaccgcggtgacgatcgcctccatgcccggaatctgccggatattctcgagcgtcaccttgtcgtcgctgccgtaccatcgaaatgacattttcatgatcggttcgtcctcccaaaacgtgattctttgccttttttctatcgtagcataccgcccgggaaaacgcaaggccgccctcgttttccggcaggatttgcaaacggacgggcacgaatcgccatgcgcgggcgccgtctgcaccaaaaaacagccgcccgataaaaattatttgtaaacattcggaaaagggcttgcaattttgcttcaattcgttataatggtgtcagattggcggtttatcgaaccgcgtgtgtttatttcagagaggagtatcaacattatgtccaaggttgtaagagttgccgtcatcggctatggcggtatgggcggctggcacacgaagcgtttgcaggagatccccggcgtggtggagctcgccggcgtatacgacattctgcccgagcgcaatgccgcggctgaggaaaacggcatcaaggcgtatccctcgctcgaggcgctgctcgccgacgacacgatcgacgccgtgaccgtcgctatcccgaacgaccagcacaagcccgtctgcattcaggcgatggaggccggcaagctcgtcatcagcgaaaagcccgtcacgctctgcacggcggacctcgaggagatgatcgcggcggcgaaccgctgcggcgtctgcttcacggtgcaccagaaccgccgctgggacgaggatttccgcattgcgaaggcgatttacgaatccgacaaaatgggccgtattttcagcatcgagtcccgcgtgcacggctcgcgcggcatcccgggcgactggcgcaacacgaaggcgcagggcggcggcatggtgctcgactggggcgtgcacctgctcgaccagatgaatatgatgatgggcaagatgccggtttccgtttacgcgacgctctcgaacgtcacgaacgaggaggtcgacgacggcttcaccgcgatcttcatgtacgacaacggcgtgaaattcaccgttgaggtcggcacgagcaacttcatcgacctgccccgctggtacatcctcggcctgaacggcagcgccgtcatcgaggactgggacatcaacggcaagatcatcgtcgcgacgagcgacgaaaagcacgacgcggtgccgatcgtcacggcggccggcctcacaaagacgatggccccccgcacgccggagacgatcaaggaatacccgctcgagcgcatcgattccgacatccacgactactaccgcaacatcgcggccgtcgtgaacggcgaggccgaggcgatcgtcacgcacgaccagcagcgcgagctgatgcgcctgatggaggccatcttcgagagcgccgagaagaatcaggtcgtctatttctaagtgcagcgcaaaagggcaggcatcccgtgaaccggggcgcccgcccttttttgcgtccgcctatcgctcgccgccaagggcgcttctcgcccagccggcgtccttcaaaagcgcgcgccccacgccgatcaggtcggcgcagccgcgctcgagcagcgcctcggcctcatccgccgcggttacgccgccggtgagcagcaccggcaccgagacgcgctgccggaccgcctcagccgccgcgccgaaataccccggcgcgcggctttgcgggttcctgtagccgcacaggccgcccgaaatatcgagcaggtccgcgcccgcggcttccagcagcgccgccgcctctgcggcgtctgcctccgtgctgccgcccgccatgtaatcgcacgcgccgaagcgcaccgcgaccgggtattccgcgccgaccgccgcgcgcaccgcgcgcaggatctcgcagtgcagccgggtgcggccctccagcgtgccgcccgcatagcggtctgcccggcggtttgtgagcggcgagaagaactggttgagcaggtagccgtgcgccgaatgaagctccacgccgtcgtaccccgccgccttggcgcgccgggccgcggcggcaaaatcgcggatcaccttttcgatgtccgcctcggccatcacgtccggcgcggggccctccccgctgtcccgcggcagccggacgccgctcgggctcagcgcgcgcagccccgggtagccgggctgtgccgcgccgcccgcatggctgatctgcgccatcgccttcgagccgtgcgcgtggatcgtatccgtcagccgcctaaggccggggacgtccgcatccgacgcgatcgagagctgccccgcgtgcgcgcggccctcggggcttatgaagcagtgctcggtgacgatcaggccgatgcagccgcccgccgcgcgctcggcgtagtacgcgcacaaatcgccggtgaccgccccgccctgcgccgccttgctcgtcgccatcgggggcatgacaagccggtttttgagcgccagcccgttgatcgtgatcggtgaattcaagatagacataaaacgcgcctccgttcttttttctggacgaatctatcgtagcatggtataatcgaattggcaagaacgcactttccgggaagatactacccaaaaggagagcgccgccgcggcccgtttccggtcggcccgggccagccgcacgcgcgccgaaaatcacgcccggcacactttgaaatgaaaaaggaatcgtgtgaaaaatactttttcacacactgtttgtgcctttgccgcggcgagcaaagcggcaaaggtacaaacaataaggaatggtgatttctatggaacaggatatttgcagggaggtcaacgtcctcccctttgcctatgccatctcgctggtcgagggcaagtggaaaatgcacgtcttattctggctgtggaaaaaggaggtgctccgctacagcgaactgaagcgcgcgctcggcgccgtgacgcacaagatgctgagcagccagctcaaggagctggagcgggacggcatcatcctgcgcacagaatacccgcaggtgccgccgaaggtggaatacagcctttcggagaccggaaaaaccctgatgcccattctcgccgccttctgccagtggggccacgcgcacatgccggcggactggacgccgtagcggggcggcaaaagcagaaaagcgccggacgtatcttgcgtatacgtccggcgcttcgcttttattcaaatacaaattcttcctcgctgaggcgctccggcatattgcggacgctgtcgcccgcgccgaccgcgcgcagcacgcggcacgggttgccgaccgcgatgctgttcgccgggatgtccttcgtcacgacgctgcccgcgccgatcacgcagttgtcgccgatcgtcacgcccgggcagacgacgacgttcgcgccgaaccagcagtcattgccgatcacaaccggctcggcgtagcaggcgtgcagctcccggccgtccttggttttcagggcgcggcgctcgtccggcagcagcgggtgctgcggcgtcacgatcgtcacattcggcccgaagttgcagttttcgccgatcgtgaccggcgcgtcgtcctgaatcgtcaggttgaagttgccgaaaaagtgcgccccgatgcgcgtgtgcacgccgtagtggatctggatcggcccctgaatgcgcgagccctcgccgaattcgctgaagatctgcggcaggatctccgcgcgcttctcgtattcgtcctcaaacgtgcggttgtactccgtgcacaggttgtggcagcgcagcttgatcgccacgaggtccgggtgcccggggctgaagagcttgcccgcaaatattttttcttcttctctcatcttgcatcgtcctctctaagttttaaatgcgccgcaaaagcggtcaaagattttcttcgataaaatgcaccgggtacatctcccagtatttccggtacaccgcgccgccgccgtcaaaattcagctggtacaggcggaagcggaccgggaaattcttcggcatccactgctcctcatacgtgtagcagtagcgcatgccgagccgccgcatcaccgcgccgctgcgcggattgtttacgtcgtgcgtcgccgtgacgtagggcaggccgtcctttttcacctgcgcgatgaccgccgcgccggcctccgtgatgatcccttgacgccagaaatccctgtgcaggccgtagccgaagtcgtggctttcccccgcatcgacgtggacgtaaccgaccggcacgccgttcgccttgaggcagactgcgtaggcatagccctgcggccgcgcgtatacggccgcgtaccgcgcttcgaaaaaagcgcgcgcctcctccatgcttttcagcggaaaccacggcagaaaacggttgacctcctcgtcgctgtaaatcgcatgcagcgcttcgagatcgtcctccgtgaatttgcgcaggatcagccgctcggtttcaagccgcggtgtattcattctctcattccttttctgactggattatttttccgcctgcttttcgagcaccagaacgccgtagggctcgaccgtctcgttttccgcgagcgtgcggccggtcaaaaggtcgcggtacgcggcgccgcgcagcgcgatttcctgcggctctgccagatagttcagcaggaacacaaagcgcctgcccgccgcactctcgcgcacggcaagctccacgccctcgggcagctcgaggcctgcctcggggcagccgataccgaacagcgtcaggaagcggcgcacggccgcctccgaaaacactgcgccgaacgcatacgccgtgccgctgccgaacggatgcgccgtcaggccgggttttccgccgtagtagttgccctgatacgtgccgagcaccgcgcagtccgccgcctcagggtgcaggacgtcgttgaaatccggcgcgggcaccgcttcgttttcccagaggatcgtttcgggcgcgtccgccgggccaaggaatgtgaactcctccaccgtgcagcccgtgagccttgcgagcgggccgggcatcggcgccatcgggcacttgccgtagatgtccttgtagcccccacggcagccgatcacgagccggccgcccgcctgcacgtacgattcgagctgcgccgtgcgcgcctcggtgatgatcgtcgggtgcgggtagaacgccgccgcgtaatcgccgagcggcgccgaggtgcccgcgtcgtcgatgttgacgaaatcgaacgggacgtgcgcgcgctgcagggccttgaagattgcatccatactcttcccgcgcagcgggccgtgccatttgtcctcgatgccgtcccactcgttgtcgtagtcgcagagcacggcgaccttcgccgcgtatttcgcgccggccgcgcactggatcttttcgaggtccgcgtgcgtgcgccgcagctccgtgaggcggcggttgtcgcggttgtcgtagttcaaaaggccgtgccagtacatctccgtgccgaacgcacaggtgcgccagcggaagtagctgacgaaatccgcgccgtgcgcgacggactggaacgtccacagccggagctggccgggcttcggcgcaggctggatcatgcgcgtgttccagccgccggggccggactgctgctccataatgccgaaacgcgccgagatgctgcgcgtccggatgaggttgtacgaggtctcgcggtcgcgcagcgattccggcgcgagcttcgacgtatcgaggccgaacgcaaagttcgggtagctgtcgtacgtcataaagtcgagctgctcgcgcgtcaggcggtggttgtcgagcacaccgaaaatgccgttcgtcgtgatgaactgttccggccgcctgtattttctgaggatccccgcctgcaggccgatatagcggttcgctatttcggagatgaaccggcgctcctcgagcatcaggtgcgggttcgaggagttcgccagcgtgtagcgcgagaggtggatctcgtcccagcttgtatacgtctggttccagaacaccgtgcccatcgcgcggttcagattctcgagcgtgccgtatttttcgcgcaggtacgcgcggaacgccgcgtggtcgctttcggcatggtagctcgccgtctcgcagttcacctcgttgtcgatctgccagccgatgaccgccgggtgcgcgctgtagcgcgcggcgatgtgctccgtcacgcggcggacgaattcgaggtagacgggcgacgtcatgttgtggtgcttgcgcatgccgtgccgcaccgggtggccgtaaatgtcgcagtttaaaacctcggggtatttctccgtcatccacgcgggcggcgtcgccgtcggcgtacagaaaataacccgcatgccgcattcggcggcgaggtcgagaaagccgtcccagaaggtgtcgtcgaagcggccctcctccggctcaaagagattccacgagaactcggccacgcgaacgacgctgatgccgttttcctgcatgcggcgcaggtcgccgcgccagaggctcttgtcccagtgctcggggtaatagcacacgccgagctcgattttcgtgccatccaaaagattttccatactttcctccccaaagcgttcagcgctgtgtgccgatgaagaacagcgccaccgtgcccgggccggagtgcgcgccgatgaccgggccgacgtaattgatgcggatgtcctgcacgccgaatttctggcgcacctgctccgcgacgtactgcgcatcctccagacaatcgccgtggctgataaacaccgtctgctcctgcggctggatcgccgtctccgccatcttctgcacaagcgcgtcgagcgactgccggcggccgcgcaccttgctgaccgggatcaggtggccctcatcgtccacatgcagcacgggcttgatgccgagcatcgtgccgacgagcgccgccgtcgtggagacgcggccgccgcgctttaagtggttgaggtcgcccaccgtgaaccagtggcagagcttcagcgtgttttcgccgagccatttgtagaggctttcgatgtctgtgccggcgcgcttcatcatcgcggcgtggtagacgagcaggccctcgcccatcgaggcgcagagcgaatcgaacacgtagattttgcgcgcggggtacttctccctgagctcgtcgcgcgcgatgcaggcgctctgcagcgtgcctgaaaggccgctcgaaaagccgatgtacagcacgtcttcgccgcctttcagaatcggctcgaacacggcggtaaattcctccgcgttgacctgcgaggtcgtggacattttgccgtcgcgcagctttgcgtaaaaggttttggtcggcatttccgactggtcgggcttatcccggtaagtttttccgtcgatcgtaaagcgaagcgagatcacggtcagctccagctcgccgatcattttctgcgtcagatccgtcgtggagtccgtaacgattctgtatcccatttcgtttcatcctttctgtgctccccgtctctatgtaaagaaagctgttttttatttagtatacagcacagagccggttttgtccaccttgattttgtgtaaattacccctttcgattgcggcggaaatcgaggtaatcctgtaagatgatcgtcgccgcgacggcgtccaccgcggccttgcgctttttgccgcgcgtgttcgtctcgttcaggaaattgtgcgccgtaaccgttgtgccgcgctcgtcggaaaaatcgacgggcaggccgcacagcgcgtgcagctctgcgccgaaggcgcgggcgttctgcgcgctctccccctcgctgccgtccatgttgcgcggcaggccgacgacgatctgctccgcgccgcgcgctttggcgatcgccgcaacgcgctcgagaagccgcgcgcggccgtgctcataaacgacctccaccgggctcgcgagcatttcgcttttgtcgcacacggcgacgccggtgcgcgccttgccgagatccacgccgagaataatcatgctttgtctctcccttccgtttcgcgggcaggcggccccgccgggcacatcccgcaaaaaacggccgccgcagggcagccgttttcatcatttcttattttttcaggtcgtactggtgcgggtcgccgagaagctccggcggcaggtggctcaggtcgttcatccgcacgacccgcacgcccgacgcagaaacctcaaattccgacaccgacgtgttgccggagagcaccacctgcggcagcgcgccgaccgtgccgtacagcagcgcgcaggccatgctgcgcagcaggcagccgtgcgacgcgacgaggacggtcttgcccgcgctttccgcgagaatcgtgcgcagcgcagacgacgcgcgttcgaacacctgccgcatcgattcaccgcccgggaacacgcagtcctgcggcgtctcgttccaatgccgcgacaaaacggggtacagcgccggcaggtcgccgagcggctttgcttccaactcgccgacgtcgatctccatcaggtcgtcgagcggcgtaatcggcagattgtggtacacgttgatcgcctccgcggtctttgcggcgcgctgcagcgggctggaatagatcgcatcgaggtgtatgttccgaaagcgcaggctcaaaagcgcgagctgctgctccccgacggggctgacgtcgtattcgtgctgcccctgaaaaatattctggagattgcccatgctctggcagtgacgcaccaggtacaggcgggttatcgcattttccatcaaagcgcctccaactctctccggcatcgtgcgcaccgatgcacgccgttcgcgcgcatccggccgcgccgccgggcttcaatcaccacgcctgcacggcgccggtcagctcggaaacggactgcacgccgttttcgtccataaacttcgagaggccctccgcgatcttcaccggcgcgtacgggtccgtgaacagcacggtgccgatctgcagcgccgtcgcgccggcgagcagcatctcgaccgcgtcctgccacgtgctgatgccgccgaggccgacgatcgggatcttcaccttctggtacgtctgccacaccatgcgcacggcgatcggcagcagcgccgggccggagaagccgcccgtgttgttgtggatgatcggccgccgcgtgcggatgtcgatgcgcatgccggtcagcgtgttgatcatcgagaccgcgtccgcgccctcgctttcggcggcgagcgccatctcggaaatgtcggtcacgttcggcgagagcttgaccatcagcggctttttgcagtgcgcgcgcacggccttcgtgatgccggaaacgcccgcgcaggtcgtgccgaactgcacgccgccctgcttcacgttcgggcaggagatgttgagctcgatcatgtcgacgtcggtgtcattgagcttttcagccatcgcgcagtaatcctccggcgtgttgccggcgatgttcgcgatgatccgcgtgccctgcccgcgaagccacggcagatcctcgcggatgaaatgatcgacgccggggttctgcaaaccgacggcattcagcatgccgccgggcgcctccgcgatgcgcggcgccgggttgcccgggcgcgctttgagcgtgatgcccttcgacgagacgccgccgagcgccgaaagcgggtaaaactccgcgtactcccggccgaagccgaacgtgccggaggccgcgatcagcggattgctgaattccacgcccgccacgtttacatgcagatcagccatcagagcaccaccctttccgccgcaaagaccgggccgtccttgcagacatggcccatgtagatttcaccgttttcaccgtacagctccaccgcgcagccgaggcaggcgccgatgccgcacgccatgcgctcctcgagcgagatctcgcagcggatgccgttttccttcgcataagccgcgaccgcgcgcagcatgaccatcggcccgcaggcgcagattatatcgggctgcacatcgcggatcagatcggtcacaaggccgtgatggccgaggctgccgtcgtcggtcgcgacgcgcaccgcgcacccggcggccttgaaatcctccgtgaggatcgcgtagtccgcgctgcggaagccgaccgcgaccacggcgttttcaccgtaatgcttcgccgcgccgagcagcgggggcacgccgatgccgccgccgacaaacagcgcctttttgcccggctctatggaaaagccgttcccgagcggggccagaatgtcgagcgaatcgccggccttgaattttgcgaggtcggccgtgcccgcgccgcggatctggaacacaaagcgcagcgtgccgttttcgcggtcgatgtcgcagatcgagatcgggcggcgcagcgtgcggcccggcacgtagatgtgcgcgaactggccgggccttgccgcagcggcaagttccggcgcacgcaccgtaaagtcgtaggtatcggctgcgatctcggcggtgcgcacgagctcgcagagcttgacgtcgtatttcatttccaccactccctgtcggttttacgcgcggatctcgccgatgcgggcgcggatcgcgtcgcgcatgcggatcgcctcgcggcgcgcggcctgcgcgtagtcgcgctcatcgcacttttccttctgccacgcgcataggatgccgcgcgaggaattgatgatcgcgccgaggccgttcttgtcaaacgccggagccacgtcgtccgcgccgccgccctgcgcgccgtagccgggcacaaggaagaacgtatgcggcgccttttcgcgcatctcgccgagctgcgccgggtacgttgcgccgacgaccgcgccgacgccggaatagccgtacctgcccatgacggactcgccccactgctcgcagaacgcgcccatcgcctcgtagacggtcttgccgctttcgagcttctggtcctgcaattcgccggaggaggggttcgaggtcttgacgagcacgaagatgcccttgtccttttcgccgcagacgccgagcagcggctggatgccgtcggtgccgaggtagccgttcacggtcagcgcgtcggcgccgaacgcgtcgagcttttcgccgaacacgtccgtcgtgccgaggtgcgccgtcgcatacgcctccatcgtcgtgccgatgtcgttgcgcttgccgtccgtgatgacgaacatgcccttttcgcgggcataggcaaccgtttccgcgagcgccttcacgccctgccagccgtacatctcatagtacgcggcctgcggctttacggccgggacgatgtcgcacagcgcgtcgatgaggcccttgttgtaggcggcgagcgccgccgccgcgccctcgagcgtcttgccgtgctcggcgacggccgcgtcgaggatatacggcgggatatacgagagcttcgggtcgagccccgcgacggtcggattctgggtttcaacgatcttttcgatcatgcggtcaaaagacatggtgatgttcctctctgtatgattttataacgagcggtttcacagctcggagtagacgattctgccgccgcagacggtcgccttgacctttgcgtgcagcgtcatgcccttaaacggggtgttgcggctcttgccgtggagcctgtccggatcgacgatccattcctcatgctcgtcgatcagcgcaatatcggcaatctcgcccgcttcgatcacaccggccttgatgccgaggatctgcgccggacgcacgctcatcttttcgacaagctccccgagcgtcaggattccagtcttgacaagcgccgtataagccgccgcaaacgacgtctccatgccgatcgagccgttcggcgctttcaggaagtcggccttttcctccggcgtgtgcggcgcgtggtcggtcgcgatcgcgtcgatcgtgccgtcgcgcagcgcctcgatcatcgcgaggcggtccttctccgtgcgaagcggcgggttcatgcggtagtcggcgtccttcttgagcagttcgcggtcggtcaaaagcaggtagtgcggcgcggtttccgccgtcacctgcacgccgcgcgccttcgcgtcgcggatcagcgcggccgaggtcgcggtgctcacgtggcagatatgcaccggaacgccgtacaccgccgccacggcgatttcgcgggccgtgccgcagtcctccgccgccgcgggcacgccgggcaggccgagctgcgcggaaatttcaccctcgttcagataccatttcttcgcgaggtacagatcctcgcagtgcgcggcgacaagcatgccgagcgccggcgctttccgcatcgcctcggcaaggcaggccgtgtcgaccaccgggcggccgtcgtcgctgagcgccgcggccccggcctctcggagcgccgcgaggtcgttcagcgtctcgccggcgatgccctccgtaatcgccgccgccacatagacgtgcgcgtcggcgtccttcgccttatcgaggatatagcgcacggtttccggcgtatcggcggcgggcttcgtattcggcatgcacagcaggctcgtcacgccgccggccgccgccgcgcggcagcccgtcagcacgtcctccttgtcggtgaagccggggtcgcgcaggtgcacgtgcaggtcgacgaggccgggcaccgccgtgaggcccgcggcctcgatcacctcggcgtccgcgtccgtgaggttctccgaaacggcgctgatgcgcccgccggcgatcaggatattgccggtgaaatcctccccgcgcgccgggttgacgatccgcgcgccgcggatcaggatcttctttgcgttctcttccatatcgaatcatccctttctgtaaaaaagcaggaatttcagggtggccaaagcttcgcggcagaggtttttcggcaaagcgcgcggattgctctccgcgtaaagcgggtacggcgcaaggccgatatggcgcgccatcatgcacgcgcggcgcatgtggtagccctgcgtcgcgatcacgaccgcggggccgcggcccattttcgtgaggatcgccttcgaaaagcgcaggttctcgagcgtcgtgcgcgagcgcgtctccgccgtgatgcgctcgcgcgcaataccgagtgcatcgagcgcgcgctttgcggcctcgccctcgctgcgcggctcgtcgcggccctgcccgccggtcgtgatgcacaccgcttccggatgggcgcgcagataatcggccgccgcctgcacgcggttttgaagcgtcgtgctcagccggttctcgaacaccttcgcaccgaggaccagcacaactgcgttttccggcggttttgcagctttccgtttcatgcgcctctcccctttcaatccgcagcgcacgcggcgcgccgcaatataccgattttattataaagaatttccccggaaaccgcaagggctccggggaaaaagttttattgcagcaggccgcggaggatcgcgcgccccttttcgtcggtttcgcgcgcttcgcggaacagcgcgcggtagaagccctcggctgcggcccggcgtgcctcggccagcgcatcgccgcgcgccgtgtagagttctccgtagatccgctcaagctcgcgtttgtactctcgaaagaacgaaatctgcctgtctccggtaccgtcggaaaccgagccgtccggcgcacgcgtgtaaattggctccgcccgctcgccccggaacaccagcgtgcgcgcaatgccgagcgctccgacggaatccagcttatccgcgtcgaacagaatctttgcctcaagactttccggcgacgcacctcggccaatgctatgcgtgcggatgcagtcgcgcacatgcgcggcgaacggttcattctgcccgacctcaatcaggaagcggtacgccttttccgcgccggcctgcgcatggcagaccgacggatcctgccgctcctccgcacggccgatgtcgtgcagcaggcaggccgcgatcaccacgtcgaggtccgccgccggctccgtctgcgcaatgtccagcgccgcatacagcacgcggtacacgtgctccgcatcgtgcgcgccgccctccatcgcgtccagcatacagttttccatctgttcgtacaatgctctttccattttgcatcctccccgcataaaatctgattttccggctgaaaccgccgtatacaaaatttcccgaagccgctccgggcttcgggaaatcctatgcagttttagtagccgtagctgctgtccgtcccggtatacgtataatccccgtacgccgagctgccgtcgagcacatctgcggaatcgtccgtgctgtagctctcgtccacgggcagctccgtatcggcctgcgtgatggtctcgccgttctccacgcggtccatcagctcctgcgccttatgcaccgtttcgtaatccggctgcatgacgtagacctccatgctcatcgaatacggtacctgcgtgtcgccgtagcccgtcacgctgtactgcacgacgttccacgagccgccctccgaaagctgacggcgcacgagcgccgcgatgtcgttgtacggcacgttcatgtcgaagcagtcctcgagactctcgaggatcgaggtataattcatcaggatgtccggcgacatcgccttttcgatgaccgcggagatgaccttcatctggttcttgccgcgctggatgtcgccgtcgataaacgaatagcgctcgcgcgcaaactgcagcgcttcgtcgccgccgagcgtgttcgcgccgaccggataatcgtatttgctcgtgctgaacgcgatgtcgttgttcagcgtaatgccgccgagcgcgtctataatgcccttgaagccggtgaaatcgaggcggaaatagtagtcgatgtcagtctcatagagcatttcgagcgtctctatcgagacatccacgccgtagatgccggcgtgcgtcagcttatcgggcacgccgtcggagatcgagagcggcacgaagtagtcgcgcggcgtcgtgacgagcagaacctgccgtgttttcgtgttgatcgtcgccaaaatattcacgtcgctgcggccgaccgtgtaaaggccctcgcgcgaatcgctgccgctgatatagagcgtgtagacctcctgcacatcggcgctgcccgaatcggcgagcaccccggtcttttgcttttcggattccacgtgcagaatctcaagttcgcgcaccttcgattcgaaatccgtgtaaccctcggtttcgccgatcacgtcgatgtaggcgaggttcatcacgatcgcgtcgcactcgccggcgagcaggccgtccgcaagctgggtgatgcccgcgaactccttcgtctgcacggcgccgccgagcgccgtctcgatttcggcgaggcccctgtcggtattttcgcggtcgagcgaggagaggatgccgaaggtgtagcccgccgtatcctgcacgctctgcgccgcatcctcggcgcgcacgtaaaccgcgaccggcgtggactgcgtgcgcgtctcggacatgcgcgagagcgtgctcgccgtcgcgtacagataatagccgcccacggcgagcaccgcggtcagcagcacggcgaggatcgtccccagcgtgaactgcaccttgaacgccgtgttccgcacaagcaaggcggccgcggccgcaagcatcgcgacggcgacactgccgagaatcagcaggttggccggaaccattttcgtccaagtcagtacggcgatgaacgcggccacaacgaccgccatcaccagcgtaatcacgaggccgggaatccggcccttccatttgctcattttcgcactccctttgatgccgcccgcgcagacaggcggatgccgcttctgcggctcatggatatatattgtatcgctttctgtctattcccgtcaacttttcggggaaaattttacaaaaaacagcaaaacgccaaaaaggcgtatatcttttctgtattattcgccgtttccataacttttttacgggacaaaagcgccgttcaccgcccgtttcagtataaccgaaaaagccgcgccaacacccgcgggcatagaaaaaccggcggttttacacgccgccggtcaagctctataaaatttcaagtcaaacagacggccgattcggaaaacgcggccggcatcacagccgcctgcccccaggttcgccgccggccccttttgccgcgcgcggccgctcagcggcgctccgggtcctcggtgtcgcggatcgtctccgccgtcatgccgtcctccgtgccggacgagcttgtttccacgcgcccgccgccgtttacgacgatcgggttttcggggctcggcgtttccgccggggcgggggtggccgtaggcgccgcagcagcgcccgcatcaccgcccgcatcctccggttccggcgaggccgtgggcgccggcgttgcgctgagcaccgccgggtccatctgcgccaccgtcacatacgccgcggaaacgtacgccttgccgccgttataggcgatttcatgccagccgtcgctgaaattctccgtaagcacctcgaagcggtcgccggaatacgcctcgctgaggatctcggaatccgtgctcgccgcgctgcggatgttgagcgaattttcgatctccgagaccgtcgccaccttgacgagctgcacggcgggcgtcgcggaaggcgcggccgtgggactcggactcggcgaggcctcgccttccgcgctgccgcaggccgccgcgagcatcagcgcgagcgcgagcgccgccgtcaggatttttttgcccctatattttccggtttttccgtttttcatatcaagcacaccgttcctttttaaatccactttaagctttacagggtcttattttatattttagcataattgcgcgaaaaatccaagatgctttccgctatttttcatttcttttgcggaatcttcctcaatgaattgaattttcccgccgcatcctgtaaaataaagctaaatcttgaatttgtggaggaatctctatgctgaaacccgctcaggttgccgaagtcaaggcgcgcggctttcttttgaaccgcggcaccgaaaatttctcggggcgcatcgtcccgcagggctccgttttcaccgccgaggacctgcgcaccatcgccgagctcgccgaaaacttcggcggcggcaaggtggtgttcacctcgcgcctcacggccgagatcgtcggcatcccgttcgatcagatcgacgcggcctgcgatttcgcggcggcgcgcggcctgtatttcggcggcaccggcgcgaagatccgcccgatcaccgcctgcaagggcacgacctgcgtctacggcaactacgacacgcaggcgctcgccaagacactgcacgaaaaatattatgtgggctgggcgggcgtcaagctgccgcacaagttcaaaatcggcgtcggcggctgcccgaacagctgcatgaagcccgcgctgaacgatttcggcatcgagggccgccgcgcgccggacttccacgccgaggactgccgcggctgcaaggtgtgcgttgtggaaacgcgctgtccctcgaaggccgcgcacgttgtggacggcaagctcgccatcggcgaaagctgcctgcagtgcggcgtgtgcaccggcaaatgtccgttcaaggccgtgcggcacgagagcgagacgcgctaccgcatctacgtcggcggcacatggggcaaacagacgcgcatgggctcgccgctgagccgcctcgtcgcctttgaggaaatcgagccgctgctcgaaaagacgatgctatggttcaaggaaaacgcctttgaaaaggaacgcctcggcaaggcgatcgaccgcatcggcttcgaccgcttcgaggtcgcgctgctttccgacgacctgctcgcgcgcaaggcggaaatcctcgcgcagccggtaaagatgcgcgcctaagcgcgccgccctttcgcgcgggggcagagtgcagcaggaaattcctcttcattcccctttgttcatgcaattttgctgttgacaaacgcgcgcattgcatgtacaatgaaaccacaatccaatgtgcttttgtgactgacggatacaagatgggcaaccatcgtgaagcaaaagccagtatcgccgaccgtctgggcagtgttcctttgcaacgctgcccttttcttttttcagcgctgcgggaacaggaaaaccacagggcgcgcaccgcgccggaaaggatgacacaaaatgaacgcttggagaagctttaccgccggaaagtggcaggaaaaaatcgacgtacgcaatttcatccagaaaaactacacgccgtacaccggcgatgaatcctttttacagccgcccaccgcgcgcacgcaggcgatgctcgaaaaatacgaggcgctctgccgcgaggagcagaaaaacggcggcgtgctcaaggtggataccgaaacgatcatcacggccacctcgttcggcccgggctaccttgaccgcgaaaacgagatcatcgtcggcttacagaccgacgagcccctaaagcgcgcctgcaacccgttcggcggcatgcgcatggtgcgcgcctcctgcgaggcgtacggctacaaggtctccgacacgatcgagaaccagttcaaataccacaaaacccacaacgacggcgttttctccgcctataccgacgacgtgcgcgccgcgcgccacgcgggcatcatcaccggcctgccggacgcctacggccgcggccgcatcatcggcgattaccgccgcgtcccgctctacggtgtggaccgcctgatcctcgagaaaaaggcggacaaggcccagctcggcaagaaggccgtcgacgccgacgcgatccgcctgatggaggaggtctcggaccagatcacggcgctcggcgacatgaaaaagatggcggccgcctacggctacgacatctcccgcccggcggaaaacgcccgcgaggccgtgcagtggctctacttcgcctacctcgcggcgattaaggagcagaacggcgcggcaatgagcctcggccgcgtctccacctttctcgacgtctactttgagcgcgacctgcacgagggcacgctcgacgagagcggcgcgcaggagatcatcgacgatttcgtcctgaagctgcgcatggcgcgccacctgcgcacgccggactacaacgagcttttcggcggcgacccgatgtggatcaccgaatcgctcggcggcaccggcgaggacggccgcacgctcgtgacgaaaaactgctaccgcatgctgcacacgctctacaacctgcacccctcccccgagccgaacctcacggtgctctgggcgaagcacctgccggaaaactggaagcgctacgtcgcgaaggtttcctgcgacacggatgcgatccagtacgagagcgacacgatcatgcgcccggccttcggcgacgattacgcgatcgcctgctgcgtttcggcgatgcgcgtcggccgcgacatgcagttcttcggcgcccgcgccaacctcgcaaagctcgtgctgctcgcgatcaacggcggtatggacgaggtgaagaagacgcgcgtcgcgcccgagatgcccgtctggcccgacgaatacgtcgatttcgaccgccttgtcgagcggctcgatttctaccgcgagtggctcgcaaagacctacgtggacgcgatgaacacgatccactacatgcacgacaagtacgcctatgaaaagagccagatggcgctgcacgacacgaacgtgcgccgcctgatggcgttcggcatcgcgggcatgagctgcatggcagactcgctctcggcgatcaaatacgcaaaggtgcgctgcatccgcgacccggagaccggcctcgtcaccgatttcgagacgaccggcgaattcccgtgcttcggcaacgacgacgagcgcgtcgatgcgattgcctgcgagcaggtgcgccgcttctacaacgcgctcaaggagcaccagctctaccgcggcgccgagcacacgctctcgatcctcacgatcacctcaaacgtcatgtacggcaaaaagaccggcaacacgccggacggcagaaagcacggcgagccgctcgccccgggcgcaaacccgatgagcgggcgcgataagtccggcgcgctggccgagctcaactccgtcgcgaagctctcctacgactactgccgcgacggcatctcgaacacgttctcgatcatccccgaggcgctcggcaaaaccgaggcggagcgcatcgagaatctcgtgcagcttctgaccggctacttcattcagggcgcgcaccatctgaacgtcaacgtgctgaaccgcgagacgctgatcgacgcctacgaccacccggagaagtacccgaacctgacgatccgcgtttcgggctatgcggtcaatttccaccgcctctcgagagagcagcagcgcgaggtcatctcccgcacgttccacgaggcgatctgatggaggggcgcgtcagctcggtgcagtcgctcggcgcggtggacggcccgggcctgcggtacgtcatctttctgcagggctgcccgctgcgctgcaaatactgccacaaccccgaaacgtgggacccagtgggcggcgagccccgcacggcggagaacctctgccgcacggtgctgcgctaccgcccctacttcggcgaaaccggcggcgtgaccgtctccggcggcgagccgctgatgcagccggaattcacggcggagcttttccgcctgctgcatgaacacggcgtgcacacggcgctcgacaccgccggcgcgggcgacctcgaaaaggccgaagctgtcttaaagcacaccgacctcgtcctgtgcgacgtgaagttcgcagaagaggccgattaccgcgcgcactgcggcggctcgctcgcccacacgctcgatttcctgcggctcacggcgcgccttgacatcccggtctgggtgcggcacgtcgtcgcgccgggcctgaccgatatgccagccagcctgcgcgccgtgcgcgatctctgcgccgcgttttcgaacatcgagaaaatcgagtggctgccgttcaagaacatctgcgcggaaaagtacgaagcgctcggcatcccgttcccgatggccggcaggcccgcctacacacagaagcacatcgatatgctcctgcaagcgctgtaaaggcgccgaatctcccacaaatcaatcagccccaagcccggttttccgccgagctcggggctttttgcatggctgataacacgtgcagaaatcacagcacatatgcctcgcccggcgcaaggaccagagcgcgggcggggttttggatgcgggcgagcagatccgccgggtcggcgttgaacggcttcatatccggcgcgtccgtgcagccccagtgccagagcagcagcttcgcctgcggataggcattcgcgaggcgcacggcattattcaggccgatgtgccagctgtcgtcggaaaaatcgaagagaatcagcttcggcggcgccatcgtgaggtgcccgggcagaaggcgcgaatcgccgaccgcccagaccgcgccgtccggcgtgtcgagccagaagccgcagcagtcctcgcggccgaaaacataaccgcctatttcggggtaatccgcctgccacgcatggtcggcgggcgtgagcgtgacgccgatctgcccgaccgtgaagcgcgccccgatcgcgtggcccgcacccggcagccccatttcggcgagcagcccgccgacgtaccgcgtgccgtgaaaagcgccgcagcttttggaaagcgccgcacatgtctcccggctgaaatggtcgccgtccgcgtgcgtgatgagcacggcgtcgagcgccggcaccgcttcgggctgaatcggcggcggcacgagctgcggcatatcgaagcccgtgagcaccgggtcgatcatcaccgccgtgccgcggctcgtgacgagcgcgccggcattgccgagccagcgcacgactgttttttccgccgcaccgaacgcctcggcaccgaacggcttcggctccggcgcgcgcgcctgctttgctttcacagaacatcgcctcccgctttctttaatcctgtacgcttaaattataaaatgttttcccccgcatgtccagccccgccccggtttttaagcgccgtatttctgcatagccgcaaaaaagcaatgcaaattcataatatgttgctggaaatatcccgcaaaatctgctatacttatgaaagaagattaaatcttaattcaaaattctgcggaaaggtcgtgatgtaagggttgaatttacgtaagaatctgtcggaaaaatggatggaggccgtccgggccgtgctgccgatcgtctgcatcgtgctgctgctctccttcaccattgcgccgatctcgccgagcattctgctctgctttctgatgggcgccgcgctgctgctcgtcggcatgatgctgttctccgccggcgcggaaatcgcgatgacgccgatgggcgagcgcgtcggcaccgcgatgacacgcaccaaaaagctcggcatcgtcgtcgtgctctcgtttctgctcggcctgatcatcacaatctccgagccggatttgcaggtgctcgccgagcaggtgccctcggtgccgaatatcattctgatcctctcggtcgcctgcggcgtcggcgtttttctcgttgtcgcgctgctgcgcatgctgttttccatcgcgctgccgccgctgctcgtcggctgctatacgctcgtgttcgtgctctcctttttcgtaccgcgcgagtttctcgccgtggcgttcgattccggcggcgtgaccaccggcccgatgaccgtgccgttcatcatgtcgctcggcgtgggcatttccgccatccgaagcgaccgccacgcggcggacgacagcttcggcctcgtcgcgctctcctcggtggggccgatcctcgccgtgatgatcctcggcatgatctacagcccggagcagagcgcgtacgccgcgccgtccatccccgaaatcggcgattccgccgagctttggcggctgttcggcgaggggctgccccgctacgtacaggagattgccgtttcgctgctgccgatcgtcctctttttccttttggcgcagatcatcgtgctgcggctagaccgccggcagcttttgcgcatcggcatcggcctgatctacacgtacatcggcctcgtgctgtttttgaccggcgtgaacgtcggcttcatgccggcgggcaactacctcggccagcagatcgcctcgttccgctaccccgtgatcctcgtgccggtcgccatggtgatgggctacttcatcgtgcgcgccgagccggccgtctacgttttgaaccggcaggttgaggagattacggacggcgcgatctcggcgggcgccatgggcatcggcctctccgtcggcgtttcgatttcgctcggcctcgcgatgatccgcgtgctgaccggcatctcgatcctgtggtttctgattccgggctacgcgatcgcgctgggcatctcgttcttcgttccaaagatctacacggcgatcgccttcgactcgggcggcgtggcctccggcccgatgacggccaccttcctgctgccgctcgcgcagggcgcctgcacggcgctcggcggaaatattgtgacggacgcgttcggcgtggtcgccatggtcgccatgacgccgctcatcacaattcaggtgatgggcctcgcgacgaagctcgccgaacgccgcacggcgaaagcggccgaagcggtcgccgtgcgcttcgacgcgctggacgacgacgcgatcatcgagctttagccggcgtgcagaaaggattttcagcctatgagcaacaccttgtattggatggtcaccatcatcgaccgcaaccaaagccgcaagtttctctccttttaccgggactacggcatctccgtgacgctgaacacgctcggccgcggcaccgcagcctcgagcgtgctgaattatttcagcctcgaggcaacgcagaaggccgttttgtgcgccgtcgtcaccgacaccgtgtggtgccgcgtgaaaaaagggcttgaaacgaccatgcagatcgatattccgggcacgggcatcgcgtttgtcgtgccggtgagcagcatcggcggcaagcgccagctgcaatttctcacaaacgggcaagagtttacgaaaggggaggaatccgtcttgaaggatacaaagcacgagctgctggtcgtcgtcgcaaaccagggctacacggaaaccatcatggaggccgcgcggcgcggcaaggccgccggcggcaccgtgctacacgcgaagggtaccggcatggagggcgcggagaaattcctcggcgtctcgcttgcggcggaaaaggagctggtgctgatcgtcgtgcggcacgagcagaagaacgacgtgatgaccgcgatcatggaggacgcgggcctcgaaagccgcgccaaggcggtggtgttttcgctgcccgtcacgagcacggcgggcctgcgcctgaccgacctgaccgccgacaccgaataaccgcgcacgaatcccgcagcggctcgcagaacgccgtatacaggcgcgtgggggggctgtgtttcccgccgcggcttctccgctgcttcggcagcacgcagcctattcccgcttcaaaagcgcctgtgcaatttcctgcgtgccgccggtcagcctgtgcacctgcggcagccagtaaaaggccgaggtattttcatcgcaccggaaatacgtgtcgtcgccatggcagagatagacctccttttgcagcgcgagcgccatgccgagttccgtgtgcgtgccgcgcccctgcggcgtgagcacgatcagcatatctgcctgccgcacgcccgcacactccgcctcagcgatgaaccgcagcgcctctgcatcctgcacattctccgggcaatgctgcgtccagtcgtacgtgtgcacccagccggcacctttcagccgctgcgaaagcgcgcgcaactgcctgcggcccgccattcccgtccgcgtcaaagcggtcatttctgtaattttcagcttcttatcgaagcagaaggagcacgcttttgcccttccgctttaagtatagcagatcgcatggaattttcaacgcggcaaatctattttcatacaggcaaattaaaagataagagcgcggccgtctcaggacagccgcgccctttgcgtccctgaagcgatgccggggacaggatttctatttcagccgaacaggttttccgggttgagcggctcgccgttctccgtggcctcgaggtgcaggtgcgactccatcgccgattcaaacggcgcggccgtcacgctgccgatgtcctgccctgcggagacgacctcgccgggctcgacgaggaacgtttcgccaagaccgcagtagcgcacctcatatgcgccgtgctcgattacaatgatattcccgagcagcatgtccgtatacgtctccttgacaagaccgtttgcaatggctttcaccgtctcgccgtgcgccgccgcgtaatcggcgcccagatgcgcgcggtagtcccgcatcgtctcggaatagaccgggtcctccgaataggcgagcagaagcgtatcgctctccaccgggcgcttgaagccgacgctcaccgtgtattcgggctgcacggcggtttcctcggccggtgtttcaccgtctgcaccgtccgccgcaggggcgtctgcgggctctgtctcttcggcctccggctcctcggccggggcggtcacgggctcctccggctccgcctccacctgcacctcgggcgccgtgccctgcgcgtggccgccggaaaccgcgtcctccgggtcatctgccgccggcgtggcttttgcggccggcgctttcacggccgccgcggacgacgtgctctccgcactgccgctcaccggctcgagaaagccggagacggtgtcgtatgtgctccacgccgcaatgccgatcgccgcgaggcaaaccgcgagcgcgatataaaagccgcgcttttcaccgctctttctcttgccctgcgtgtctttttcgtttttctgatccatagccatatgctcacatacctttccacttcagttgagttttggatatgcgtagtataggcacatcgcgcggcaatatacgcgcgccgcgcgcaaatcccggcgcgcggaaaattttatgcggccgagcaaaacggcgctctgcacacgcgggcgccggctgtgccgcgggccggttttaaacaaaaaaaggaaaaaggaccgatgcggctcggtccttttccttctagcttgaggggtatattgaggagggtagaacatgtatccaagaaaggtgcggttcctatctgttgaatacgggtatattatacccccgccggcaaattgagttgttaatcagccatgaataagccgtaaagaattttgatgggttttgtgaacgctgggtaacgatgctttcataaaaaatattctgaaaatccaaacaaccgtttgcaatttggcaaaaggtgtgctatactaatgccataaacagtattatgccctcttgcaaccatcatttacggaggaatccatatggcactcacaaaaagtcagcagctcgtatacgactatctctgcaagacgatggcggagcgcgccgtgccgccgtctgtccgcgaaatctgcacggccaccggcctgcgctccacctccacggtgcattcgcacctgaaatcgctcgaatcgctcggctacatcacgcgcgacgccggcctgaaccgctcgatccatatcgtcggcgcagcctccgcaaagcaggtgccgattctcggcaaggtcacggccggcctgccgatcctcgccgttgaggacatcgaaggctacatcccctacccggacaagagcggcaaggagcttttcgccctgcatgttgacggcctgagcatgatcaacgcgggcattctcgacggcgactacgttgtggccgagcgcacccccgttgcggaaaacggcgagatcgtggtcggcatgatcggcgacgaggccaccgtgaagcgcttttaccgcgagaacggcacgctccgcctccagcccgagaaccccgatttcgacccgatcatttccgacgagatctccatcctcggcaaggtcatcgccgtcatccgctactactaagcgggcgcggcccgcggcggacgtccgcgcggtcgcttgtttgcacaagctcgttttttgagggcgcagcctcgcggggcgcgtgctttgggtgctcccgtgcgggcgcggcccgcggcgaatgtccgcgcggccgcttgtttgctcaagctcgttttttgaggacgcagcctcgcagggcgcgtgctttggatgctcccgggcgggcgcggcccacggcggacgtccgcgcggtcgcttgtttgctcaagctcgctttttgagggcgcagcctcgcggggcgcgtgctttgggtgctcccgtgcgggcgcgggcgttccccacagatttttatggaacggatgaaaccgccgcgcggcatggcttgcctgcgcggcgattttgctcaatacggcataaaacaaggaggagaagcatgtctggattcatccgcagcaccgccaaggcgatcgtcctgcacgaggggcgtgttttgctgaaccacgccgccgacgcataccgcggcgatttttacgcgctcccgggcggcgggcagcaccgcttcgaaacgctcgaggatgcagtcgtccgcgagtgccttgaggagaccggctgccgcgtgcgccccctgcgcctcgccgcagtctgcgaggaaatctggcggtcgcccgcattccgcgcggcccatcccgaatacgcgcaccgcatgctgcatattttcctctgcgcgctcgtgggagacgcgcccgaagccgagccgaccgagccggaccgcggcacatacggcatcgaatgggtgcctctcagcgcgctgggcggccgcacgctcgagcctgccgtgctgacggactgcctgcccgcggtcgtcgccggcagcacgccgctcttcctcggcacccagtggattgactgaggcgtccggtttcatttatgtccccggcatcgggtgcggcgcacatcttatcccggcgcttcggcggcgcgcacctgcaagtgaacgcaaaaaatgccgccttaggcaaccgccggagggaggctgcgccaaagcggcatttgggggattaaaacagaatctcaggttctctgcgcggcacagccatgattggctgtgctatttttgcgcttattttccggcgcggcgccgccgcgtgcctttcaatatgtctcccgcgcgctaaatcctgctgcaattccgcccaacccgcgggcggccgcggcctgtatgcgttcattcctttcctatcaaaaagatcctctttgaaaaaccgccgcgctccctgtgcttcttttcataggcgcgcaccaatgcctcggcggagtgcccctgcatttcacacagcgcgtagacgacctcgagtatatcggcaagctcctcaatttcccaggtatgagtgcaaatccgacaattcacggaaaccttgtcattcatacctttgtatgcccgcagattaagcgttatcagcgattttagaccttttcggtatagctgtcataagcaaggcaaatccagcctgcgccgcttttcagcttgccccagagacccttgttacctgcgctgtcaatctgtccctgcgcttcctcaacaatggtgaatacacccttgccagtataagagccagtagccgcatagttcgtgcctgcgcccttacgaatacgcaaatcagaaaccttgacacgcaccatatacggaacagcacttgccgtactgccagaagaagcagagccgttgacagtgcagtaagacgggttgagcagataaatccagcctgcgccagatttaagccgtccccagccgtctttgacctcaacaatagtgaatacacccttgccagtctgccccttcaccttgccgctcatggacggctcagagcggtagttcaaatcgtttatgatgacctttacggtaaaaggaacgtctggaaatgtaccgcttgcgccgctcgtgctttccgcagcgtcataggcagtcaggttccaggtctcaatgatattgcagattttctccacataatccggggaggtagcgtagccgccgtccttgataatctggactgcctttttgtagtcagtacagcctttcagaccatcatagcgtttcttgctgccgttcatagcaccaagcagatatgcggaatggtcagcaatgcactgttccacgctggaatacttgcggaagtcagccgtgacagttacatactgcccgttctcatattcctgcgttttcttcgtatacttgcttgtgccatcccaagtagagccgccccaggtattcccggacagactgcatttcataccaaagcagttgttggcgttctgagccagttcggacttaccatacccagactcaaggataaactgtgccagagacacagaagccagaacgccgctgttcttctggtcagccgtgaacaaactgccaatcctcttgataatgtcggcgttctccatatctttcagggaagtagcctgcaagccagaagtgtcagtggaggacgtgccgcccagcttttccgtaacagccgccgcaaggtctcccagacggttgtaaagccaatctccggggcaagccttattcgcaaaccagcggtggacggtaagcaccatttcacctgctttcggctcataggcaagggtcttattcttatcacccagccaaatcagcttcgtcttaccattgcgcttacaaatatccacgcaaagcgtaataagtttctggtaaacggcattgttcatagcatacggatgattgaggtcggacgcacattcaatcgtgaccgccctctggtcattcgcattgctggaagaacaccaacttctattcccttcatccacacacagaaccactctgccgtccttgccgataccataattgcagcttgcttgtcgggaagtgcttgtgaagcacccgccgatactttctgccgtaagctgccccactacacagtggggcgtaatacggtcaatggaatgggttcttgcaccgctatggttcgggcttttgacagtgcaatccaccaaagaactgttgctcataattattctcccttctttttcggctcagtgtaagtaagtgcctgcgtagagtcggctacaccttccgtggtcgggtcggtcacaacaccaaggatagccagaaccacgaacagtgcattgaccacatcaatcagcttgtttcccaggtctcccaggtcaagcgtgaagccaaagagtgccgccacaacctgcacaagcagaagcagagccgggataatagtcagccagaagttcttgttcttaattcgtacaatccagttaatgttcgtcatggtaaatacctcctttaaaaaattaaggggctaaaggtatctcacccttagccccattgagccatccagaaccgttgtcctggtttcaatattctcaccccttaatgggcagttccttcacttcgttcagaagttctgtcaccataccgtttccaccaagcgcatgataagcgtcatacatttcaaggaaattctgcaagccatgtttcgtcacataacctctcgctttccattcagcatgatactcaatcaactgtacccgcagaagcagcatagtacctttgctgtttgcgtccctgtctttcttctgatttttcagcaaaaagactatgtaccccataagagccgtaagcacaatcggtaacgcaatagtgtacgtctgcattaaaaactgttccactggaaccaccttcttccattatgtgatttacctttcggaaagggaaatgaagtaaacatattcactcccccccccttccaaaatcctgtagtttactcacccatgagggtttccagttccaggtcaatcagtaactccttaacctggtctttgatagtctcaggaacactatcaaaagtacgcttgcccttaacaataagagcgacataaataacagccatgcgttccacctcctttcttctcacaaaaacaaatagattgccaaaaatattgagaaacatattactgctccttcaataatttcttgacttctgcacgaatttgttcgggaacgtcatcaatagtttttatccccttgcgaataagagcgacataaatcttttccactttacacacctcccactatcatttcataaagttcagcaagagcaacctgaatatcggttacattgctttctgtaactttattctgcaattcctgtgcagagagttctctgaaacagatatgaaagccgtctgcgtcctccacctgctgaatgagttcagcgttgtgcatggtaatagtttcctcaccatccgtaatctcaagcgtagaaagattgtccttaaaaacactctcgtccactttttccttgcgaatatagttgtcaccattttttgtgaaccctgtcagttcagtcccatcagccaaaatcagtttgtacatggtaatgttcctcctttaacttgttgtagaggtcattcatatttgccctctgttgcctgctcataattcggtagtgattttccatccacgaatggtacagattataaaattccttttcagggagtctcccagccagcttcttcaatttccgtctcatagtcgtaagccttttcggattgattttatgtatcaccctaccagtttccgtcagagagtattgcacttgaagaaacctccacatttcagacagcttacatattcgggtctttctcacattcacggtgatacctattccctttgcaatctcaataatttctgagagcaagtcttgtaaaaactctttactctcatggattgcgtagctgtcatccatgtacgcaccatagaactttacccctttgacaatcttcacaaagttgtctattggtattcgataggctatccctgcgtcctgcgctacctggtctccaatattcaaatgctttcgcatgaacttttcgcccgtcagcagccgcctgtcaattttctcatactcaagagagttgaacaccgtttccatacagtgggcgtattcttcatccgtcatgtaggaaacatctatcttctcccggtcaataatccgctgtagcaaacgcaaagccctttcgtccgtgatatattttgaaaacagttccatcagaacgtcatgctggatattgtcatagtattttgaaaaatctatcaaaaggatatatccatcattggaaccatgtttgctataaaacctgtgcaggtgggtttccagcctgcgtctggtaaatgcaattcccttaccctcaaggcttgcgccgttatcgtaaataaggtgtttgcgtattgccggggttatcacttcatcacataaaacgtgtttcaccactctgtcctgtatctgttcgccagtaatacatctggtcttaccacgttcattgataatgaagcgtgttccgggtaaaaattcgtaggtttcatcctttaaatcctgctggacttttgccagcgataaaaggtaggtcatttcaaacttctgtacctgcggtttccagtcactccctttctttgcttttatgtaagcgtcatacaacgcattgccgtcaaatatctcacgctgataacaggagcggtcgtaaccgcctgtgtcgtgtttagtatttaccatacggaaggacaatctctcctttctctcactgtgaaacggtcaaatgcctatttaatcacagtatcgaaatcgggacgaacgccattagagttagaagcgttgttgtagttcgcattgccgttgttgttgacattggcaaagttagcagcggtattagagattgccctgtgaaagagctgttttgaacttgttatcagacttcctccaacctttgataaggtcaatttctttctgaatatcagcaccaaaccgcaagtaggtattcacatcaactggtagcgtctcgattgcgtactgtaattcctgaaccagtctgtaacattgaccgattgccaaatcttgatgaagccgcctttcaaccagttcttccgggtatgtaggatagatactgtttgctgtatagacgtgttcaccgatagaccgcagacagtcaataatagcgttcctttcactctcgataaaccactcgtcaaatgcgtcctgctttttcttctggcggtcatgctgctgtttctcaatgtcagtaagttcctcgtaacttcggctaccgaaccgtctttccagacgcttctcagattttaccgcattgtaaccaaagtcccggagaagcaaatcagtaatttcctttctcaatttattcaaatggtggaatacctcaaactgagagggtttccgtttgctttttaatactgacatatcgcaagttcctttctacccctcccccttgtggggaggggattttagattaaccgatacagaaagcgggacgaacgccaagagaggcagaagcggcgtaggagcccgcacggccgtcgctgtagacaccggcaaagccagcagcggtaatcacatctctcagccaccatgtagccctgttgcaaattctggacggttccagagcaaagagcggcaactgccccttctcaacacggtaattgttcggaacactgctgccgtccgataccgggctgaaaataccactgccataaaccatgtgttcacacatcaggtcaacggtactgtctgtccactcaccagcagaagccctaccgttggacgttgcattggaaagataaattctgtgagacagaacgtgcgaacttccaaacgcactgttgatagtggacttcgcctgcgccaagttcgccgtgtacatagcagagcctttgtatgcgccagtggtcacgttggtagtgttcatctgagcattgtacaggcaggtatcaggcacaatgactgcgtggtgtttcgtaaaactggtatcgccgcagttcaggtaatagtcaaacgccgcaatacgccagttcacgccgccgataacccagtaatcaccaatgtacaggtcagtgaaagtaccactggaaatagcttcccactgttcctccgttacggtagtgccaaggttcttccctctgtagatagagttgtgcgccccagcattgtcataggtcaactgctccagaatggtattgaccccttccatgtattccttcaaatcctttttgaagttcgccgtggagatagtcttgactcccgtaccatcatggataagaagcaggctgtcatcacctgcggtaaggatagtcccaaggtctccaaatttctttgtctgaacgctaataaccgacatttctttattcctccttatgtttccaatctgccaaaatagcgtaatccaggtcatccacaatgagagtgatagtctcgtcatccgtagcaatcggagcagagaagtcattctgcatagtcatgtactctaaaagactgagcctttcgtccagttccgtacactgattttgcaggttccccgcagcgtcctgagataactggttctgcatagcctgaaaccacgcattgaacgtctgttgctgttggctttcaaactgagccatactcgcctgatattcagcttttagattatcggtgtaatcgtcaaaatcctctgccttgctgtctgcttcttcctcaaacaaatccttctgcactgcaaagtaattctggaaagctgtatacaggtcagttccattctccaccatactcataagcgtattcagggcttcgttcatcctgttagcgtcctttgcgccaaagaaggatttttcctttcctgaatacaccgttacgtcctggaaggaaactgtgccgtcctcattgttcacggtattgtaccgcttcaagccactccaaacagcgtccgtataatcaacgggtaaaagttcccatgccatttacaagtcccctcccttcattccaaaattccatgtaaacatcctccttccctcactctcgtttgtcagacggtcatacaggtcaagaattgcgctttccaagcggttcaactctgtaaagtccattgtgtttccgttatcgtaatatacgggcggctccccgtatgccatctgcaaagtagagttgttaatggttttcagattttcctcaagctgattgatttcatcagcatagaaataatccttcggagttctgtctgttcccagactgacaatggaaaattcgtcatacagtttgatagccatatctcgcagataatcaaggttattcttgatacggttaaaatccgcagcattgaacctgtcacccgtatagttgccgtcactgtctgtctgcccatgccaatctgttttgggtgtaacccaactcattgaacctcacctcctacgcggttgtcctgcgggctgttaccttcccggagaacgcctgattgaagttgatagtggttcggtagatattaaccttcataccgtcatggaactcattctcctggtacacaatatcgtttgcgtcaatctccgggttccctctggtcgaatactcatactcaatgcctgcggaatagtagtcccccagccaatcagccaaatcctgcgccatttccatatcacttatcatggggttttcccatttcacggtttttcctctcaggttcaaagattttgtcgcatatcgctccacaatcttgtaccgataccccagcacttccagtcggaaggttcctgtctggctgaatttgagggttacataatagttgccccagtcggtgattgtcacgccagaacttccttcattcagcgttgcccggaaattgtaggaaggttcaccaacaaagaaggtttccacgtccccggcagttacggtaatttcttcacttaccagtgtttcctcagaagttccctgctgataactgtaacaggggacgataacctcttttaccaattcctgcttaattgctttcggggaactggtcatatccattcgctccatagtgaagtctgtcacatcaccaaaagcaaagttgttcagcacaatgcggttgtaaggttccgctgtccctgtaaactcaatctgcatggtgtcaaagtcatcaaagtcatagaggataaccagaactctctccatttcttcctctacttcgtactctgtcaccaggtctccattgttatatgttctaatcacaatcccggaaggtaaggcatttccgaacgtgaacttaacgccgtgatacatacaggcagcttcctgaacgattgtcacgatagggtttgtagtgaactttccttccccgtcagactgctcattggagacaaatcctgtattgagcgttctcgcactcgccgttctgggaaggaaatacatctttccgtcagcagtcgtgtaattcgttgccagtgttgcgtactcacttttcgtatcggtattcaggatattcttcacattcgagtaatccgtctcaccgttactgctcgccgccgcttctggaataaagttggatttaatctgaatggttccgtacctcgtctgagacaacgtgcagcggcaggcgttggcgataatctgcaacgcttccttatgctgcacacggggcaaaggatttttggaaaacaggtttttcagccgtgggtctatgtagtagtctgtctgccctgcgtcctgcaaaacttccagagccaggtcataatagcttttccccgtaccaacgtacattcccttgtaatactcagagtccatagtcctgaaaacgtcctgacagcggatagtcgctgtatagtcatcagactcccactcagagcaaagcaggtggtttcctcttacccattcaatcccgccgccatctgggagctgatacccatagaagatttccatttcctgtccagtctccaagaagttgatagcagacttcggattgtccacgttgaaatatttatcgtagtttttcaaggtaacggtaaagtcaatctgcggaatatcactgccaataggggaaacatagctttccagagacgaactcaatacagagtcattctcataaatcaagccataaccaaaacggaaagaataaatcctcagtctgctttgagggtttttcatctggtagataaccaaagtcagtgtggttacactttccagcacttcttctgtactgaaaactgcctggtcattacctctgaactccaccacctgccccttatcagttacaaagtcaaaatcggtagggtagttctctccaaaattgattgtgatacctctaaagtcggttgccttgatattcaggtcgattgtgacctcatactgtgcttccgatacaaggtctctccctaccagcccggtatcaaggtagagcgcagacggggactctctgggcagaaaatacatagagccatctacccgtgtaaagttttcttccagtgtagcgtataccaagctgtcatcatgttctttgaacagattttcctcattggaataataggtaaaatccccgtctgaaacctctgcctttgcctgtgcttcctgattgaccactccgaaagagagcattatataacctctctcccgcaaaggggctttcatgcttttcttatatgctttcgatactttctgcataatcactcccccgtatcaatcagatttaccttgcaattcctgtagtgcgtaggcttgccgtcatcatcaacccagtaaggttcagcagtcctgtcaccacagtacatcttgattgttttcctggaattggtaacagggtcaataaaggttacgtccacaaaaaagttggatagaatactcagtatcgtttcccactgttcggcggtcagccacggccattcaagattgtcaatcttatactggtcacgtccaattctctgtgccaccacagtaccgttagcgtttcgcccggagtcaaccagagtagtgactaccgggcttacgccacgtttaggagacggtaactcgtacccgttaattgccagatatgccattgtcaccgcacctccttacttcgtaaatctatatccattggctttcgtctgcacatctacagcgtccgtgataacacgattgccaatctgcacaatcgggtgttcgtccttatctgcctgtctgcgggtatcttccgcaatctggttcagagtcggctccacatactcacgatagaagtcctccatagcctgcttaaacccagtggaagaaatttcattgttcgtctccacattggaagaaatagttctcgcaaatgcgtcagagtcgtaataccgcagagcagaggtatcaaccgccatagccattgtcggcgtaatatttgtgaacgagttagcccattcacccaccacgcttcttgtggtcttacccacttgagcaatagcgttgttaaagcccgcaacggcaaatccaccaatcttatagaaaaccttagacggagaatttatatccagcgtatcctcaaaccagttcagaacggattgtccccaacttactacagcgtccttacaccttctcgcccaactggtaacaccgtttgcaaatccatccacaatgttctttgcaatggtactccaagagtcattagagttctcagactggaaccactcttttaccttgcttgcccaggtcgtgatattactttttgcggttgtataataagaaccgattttgttcttaaaaccgttgataacatcacttgcaaacccagcgaacgcagagttagaagcaatcccagtaaaccagttctttacattggtagcccacgtctgaatgttactcttagtggtcgtgtaggcagaaccgattttgtctttaaatccagtaatgacattgcttgcaaacgtagagaagtttgcgctgttcacgccgccaaaggaactactggtaaaccattccttcaccttgcttgcccaagtcgtaacattcgttttgaccgtggtataagcagagccgattttagacttaaagccctcaatcgtattattggcaaacgtagagaagttctggtaattcacccctccgtaagaactactggtaaaccactctttaaccttagaagcccaggtggtaatgttcgttttcacattcgtataagcactgccaattttgcttttgaaaccttctatggtctcactggcataagtagcgaatgtggagaggtttacacctccaaaggaattactggtgaaccactctttaactttggaagcccaggtagtcacattggtcttgacggtcgtataggtagagccaaccttatctttaaaaccgctgataatattcccagcaatctctttgaaatgctcaacaattcccttgccgtcctcaccctttgtaaaccactcaacaacactgcttccccatttcttcacagtcccggcgatagaagaaaagaagttgataccttccaaaaatccttccaccacatactgcccgatttctttcatcaccgtagacggagagtgaataccgaacaggtctttgaaccatttcacaaacgggtcaacgatatgctgtttaatccatgcgccggggtcatcaaagaactcctgcacaccctgagtgaagccgttccagaggtctctaccagcctgcttgaactcagcccatttttcctccccaaccagtgcgttaaagagcgggtcaatcatgttgtccatgacccaagagcctatgtcggcaaatcctttgccgattgcgttcagaaggtttacagcggtttccttccaatcctccccggcaatctctttatcccaccagttcttaatgtccttcccgatacttccaaagaagccacccaggaactcaacacaagaacgaatggctgtgccaagaaaagtgaagatactgcttgcgatacctccccagtcaatgttggtgaacaggtctttgattttctgccagagcagagaacccaggtcagaccagttgtagctattcagccactttgtagcttcatcaaacgcaccaatgataaaatcactgatactcttacctaccagtccccaatccagttcactcaggaaaccgataatcaggtcagggagaatggtgaaccatttcaccatcaaccgccctgcgtaggtaaaatctatctcactcaaagccgcattaaacaattctgctatgtgcgctccaaggttggtaaaatcggctgtatcaaggaaccaatacgccgtctgaattgcaccgttcagtccgtagccaatcttatgaccaataccagaccaatcaatgctgtccacaatctcgttaaacttttcacccagaagggttccaagttctttccagtccccagcttcaaacgccgctttcagtttgtcggcaaactcagagatagagttttcaatcggcaactgctcaaacatggaaccatagtctttgccgcctgcgccacctccgccagaaccagaattatcattttgactgataatgttcagttcatcaattccagtggtagcgtccttaatctcttttgcagcctttttcgctgtccctgcggtatcactgattgtgtccccgtaagaagcggcagattttttcgccgcagtataggtacttgcgcccgtcaatctcgcaaaaaactgattgacgatattcagcagggcaacaaacttatcaatcaggaagtcaatagcaggagccagagcgttaatgataggagataccatagcccccatactgttttttaagtattggaaactcgtagccagactgtccatactactcttgaactgaccgcccatgagcgaactgtactggtacaggttattgataccttccttcatggcattggcaaaaccataaatcaggctactcaacccctgatagagaagaacctgtttaaaagcatagcccagtttccccagaccagaagtagtctttttcacttgtgccgccagtttagaaccaaaggtacttcccagttttttacctgcgctgattgcagctttcgccgcagaactaataccattcagagaccctttcagccccttcaaggttgcgccgcccaaagcagaaaatgcacgagagaatacccctccaagatttctcagggtattcataaagccattcgtagccgtatttgcacccgtgacactctgagtatactgagtcatgccagaagtagccgcagcagcggcagcacccgccccagcagcactcgcacccgtagaagcaggagcagtagcgggagccggggcagagttagcagaagaagtacgtctgccgctcgtaagccctctcaggttcggaacctgtagcccctgcatactccgtagagcctttgccaaatcctcaactttttcaatatcagaccaggtaaggctatccagtgccgtaccgatttcagtcagtcttttggagattgtgggggaaactttcacggtattcagttgatttaaggctttcgcaaggctttccagcttttccatgccagtcagcttgtcctttgcgctgttgatagcttccagtttcttactcacgccatttaaaccagcgttacctttcagagactttttcagcttttcaaagctgtctgccaatgcgtcaacacctttcgccgctttgtcagagtcggactgaatttgaaactcaagaccttcaatctcaactgccataggttatccctccttcccaaatttcttgttaatccccgccataagcgccctcatagcacccaaaccatttttcatcttttcccgattttcttcatccttctgcctgcgggtttcggtttcagtaatcggaataggagattttctgtagggataaggctttttctttttactcagagcgttcagtgccggggaagcgtccagcagggcttcgtaaatataaaccccttgaagccaagcattataattttcacgttctctttttcgttcttccgcttcacggaaatattttgccatcatagagtccccatcccagtattcgtgataggtcatccctatgctcatgtaatatccgcaaagttcttcaaacttttctccgtaacgtgaaacaacgggtcggcggcggttgccgccgcccgttgcagccccggactcagaacccgttaccagttcgttgtccactccacgtttttttccgctttgtcatcaggctcctccatcagagcgataatcggctcattgtacatttcagccaacttgccaatcaaatcctccttattcggcatagccttataaatcttgtcaatggtctcctgcttcacaaaacggtggtgtgctttaaacgcacctgcaaacaaagcagggagcagcgtcatagggcgggagtcaatctcctgggcaacaaagccctcgtcctccatctgcttgacggtacgcctggtaaactcaagcgtgtattccttgtcctcaaaagtgaaaataatctgtttagccattgccaaaccctcctttaattcttcaaattaaatgtttcttacacatcatccgtgacttcactgataaccgtggacggagcaatcgtgatggtcataccacgaacctcattcacgccgccgcccgtaacaaatacggacaaatcaccacggaaggaaaacttaccctcagagccagtaggcgtaggcagagaagcagtctccgtaccgccaaaccaaacagcgtattcttcgtccttaccttcaagtgctttcagagccttgtattcggtaaggtcatagttcgcattgaaattcagaccttcgttactctgaacaccctttacatacgtctgcatacggtgggacagagtagtggtttccagcagttcaggttcaccgcccaggtcggggaactccgtaatatccagcaacttctcccatgcgtcctcgttcttgtgcatgaggaaagtcatataggtactcgtagccatacttattacctcctgtaaaaatgtttcccgtcagtcgctaccctgtatcgggcagtgatacggtagatagttgcgtcctccacgttcggaacgggtgtcattgccgtccgtctgaaattcatggagtacaattcgtcatttattactttcagaatgttcttacattctgttttcttaccatcagtcctgttggagtacacattgatttcaaacatgacctcaatcatgttttccttcatgctcgtgtcttgccgctcattcagcgtatagctgtcactctgggtaatactcgcatgaggaaaagaagaaggtgactgcacatattcactggctacgtctataccaggaaacttttcacgcaacacctgtgcgactctggtataaacttcattttcgcagtcaatcatgtgtaacacctccttgcaatttcttcaaaatgttcttccaactcccggactgtccggtacatactcatattggcagggttgccgtaggtatgtacctcgccagcgtgttcaccactggtgataacctcgccattggaacctggattgcctgtataacgccatccgtttttgagcctgcccaggtgatacccgtaaccgccacgggtaaaaccgttcttcccggcttccgggtgattgtcaggatatttcacgcctgtaccaaactcaataaacagaaccgcacctccaacggcaacaacggcaacggtatcttcatccctgttttccacggagacttttacatcattcgtgccgtcataaactgcccgctgaaattttgctgtagcaatctgcgccccttcgtctgccagggctttcagaaatttctcagtgcaatcctttaaccatttcttatagtcattcagttcctttatggctttatcaatccctttctgggataactccaccttgataacacgcttcttcacgatacagtcaccttgcttatagcgtaagagatattgttcagtgactttgccactctccgcacacggtaatcaaagagcggtactccctcttgactgaactcaggctccttatctacaaaaagcactgtgttttcatcaatcgggcaactcatatcgtccgttattagaaccttgtcataagactccaaattgccgaacatatttacctgtgcatatcccgtggcgggggaaacgctgcacaaaagagaaacgggggactcataagagatacgggtctcgcctgtctcataaccactgtcatcaagcagcggttctttccctttgtacaagcaataatgaatgggggataaattgcgcttcatcagtttcatcacaacacccccgctgtaggaacgatacggcgcagcagagtaggcggtatgtcaccatcttcataagaacgggaaacgccgttttcgctatgactcgtctctccctctgcaccacgcttattcagcatatacgccgcaatctcaatctgaacattgtcatactgagccggaacttcttcaacatccccgtatgggtaagcgtgagtcagaaccaccccagcagccagagaaagataagtggacagcacttcgtcatccgtctcacccgtaatgcgtttcagaattaccagtttttcatcattcgtcatgctgtccaccctcctttcttaatcaggcacctgcgccgccagtggggaactcagaagcgttcgccacataaacggaacggctgtaagtcggcttgtcaaacttcgtgctgacacccgtgaacttgccgtgataccattcggggccgtggtcaagaccaatctgcccgaaaagctgatacttctcacctgcgccagtctttgcaagcggctcaaggaagaagttgcccttaccgggaacaggctgataaacgggagccagaacactcaggttcagaagcagagccgtaccagcaggcaggcactcaccaagatacaggtaaaccacaccgataggcgttaccacactggaaagagcgataccgttaatctcacgggcagccgggacaacggtaagaccgttctgaacagcgtcagcgttcacctggaacagcgtagtagcgtcacaccacagacaaagcccatcagtcggggcgtttgcaccgtagattttcttcaccatatcggcaatgtcccacagacccaggggcttattgctcagagccatagtgttactggtgattgccgggataagaccacgggttttgttcggggtgtcatcatccgttgctttctgatatacgccgttaatgaacgtgtactcaatgtcacggttcaccttctgaaccttcgctgcaacctggaagtccagttcgttcatggggttagcctgctgattagcaacattcagcccggacagagtacccatgttactctgcttaccgtaagagatacccacggactcctggaaaatctgggtcacattggttttctgctcacgcttcgtcaccgtagcgtcaggggcagtcagagaagcattctcactgatagcgggctgagaaccatcaccgcccgcagtgtattcctgcccggtcacaaattctacatggttcgtggtttttgccttactgccgataatggcagaaagcggggtacgcacgttacccttattgaacagcataccgctgtagttcagtacaccaaaactggtagcaaacgtatcaggcattatatgtcactcctttacttattttctgcctgtgccgcagtctcctgtgccatcaggcgtgtataatatgcggcagcggtataatcgccgcttgcctgtgcttctgcgattttcttctgataatctgcgccgccagtattttcagaacccccagcaggacgtggggttttcttcattttgtcggcaagaatatccttcttctgggcttcgagatatttactctgattagccatcacagtgtccatgtcaccgtccaccatagcggtagcggtactttcagccaactgctcgtcataacccattccaagcagctttgcctttttctcagaaagagcgatagaccgtttaaggtcggcattttcctgagtcagcttttccatattggctttccgttcagcttccgcagcttcatcatccgtctgcttcgtgcgtaactgcttcttatagtcggcagcttcggaatttgcctttgaaagcgcagctttcaacctgttaatctcagcttcatttccctgtccaaccgtctgtaaggcagttgaaatttcatcttcggtcatgccctctttgtaggcactgcccagcaaatcacttaaataactcataatagtcctccttgcgtttaaggtgttccctcaccatgttttccgttttatcctcttgtctgagtttgcgttttaaggtgttccctcaccatgacaagcagaagggttaattctgcaaaccatccattttcagcaccagcacacagcggcagttcgcattgttccatacctgagtaaatccatgcggagccagggcataatccccatcccaggtatagaaatagtcatccagcggaaccgtcataccttccaggtatctatgggtatctctcacatcttcgtccagcatggttcgccatacctttgatacccttatccctgtatttctctggtactgttctccaccgtcataaatggcggcgttgaaaaccctttgatactctgactccaccagtagccttaacccggtcagattatcggaagctacatgggttgccactctgtcctcaaaggtttttccatcaatcaggaaatagataacgtctctcatgctgtccacatctacactcaggtcagccgtaagcatttcacctgccgccgcaattcccagtcggtaggcttgtatcagaaatgagagtacgtcatctgcaatttgttcttcgttatcagcagagtaataactggcagtagtaagcacattgagttcgtcaaacgcttcaatgtaagaattaaaaatctcattcatggcaaaaataaaaggactatgagtttgtcactcacagtcccattggactcaccagagccgttgccccggcgttactccttcattttcagctttcgtttgacttctacaatggctaccttaccctgctcaatcagtatttccaccctgctcccgtgtttgagcagtgtttccatctgttccaccatttccttcgttatcactggggtcatcttcattacctccctctttcacagcttgctgtttctcaaataactcctgggctttctcttcctgttcttcggcatattccacactcaatgtgtaagccaaatcagagtcaacaaacaagccgcagtgttcaaaggcaaggcgtggatgaattttctcattcttaagcatgaggtcaagcacctgtgccttttggtaaatgttctcgtagttacgcctggtaaaacggatttcaatgttgcagaccttcaaatccatatctaccagcgtatggcaaatgtttaaaatcagtctgaggaaaaccctctcagactttttaaacatgagttcgctgtccttcgcccttgcttcggcagcagaccagccatcacgcatgataactgcggaacctgtatcactcgtagaagaaccgccgttacggttcggcataccgcaaatggtaagcactgtctgatacatatggtctaccagagtttgcgtttcactctggtttagattgctaattaggtagtcaatctccgctttcatctgcgggtcaatatcccggaacttaattgccccttcctcacgcaacttttgataatcctcagaggaaatatccacgttatggaaaagcataagagcctggacaaactgctcaactccatccagcctgttactgtctgtcaggttgatagcgtccagcaggggaataaccaactcaaatgcgccgatacgggcaatattcaacggatattcgataatcggaatatcccccagaatgtgcgtatcatgtgcgacaatctgagtgtccacgatttcaaaatactcgtggtcggaatagcaactgtaatgcaccagcccgttttcgtccaccacatatttcacacccagaatgggtttatttcccagcccgttgtgatacaccacaaaagcgtttctggggtcaagggtataaatctcaaacggagcgtcatcttcctcacccgcttcatcaggcagaaccattcggaaggaagttccgcagatatgaaaccagtcagccagctccttatcctttgcaggcttttcttctgcaaaaacaaactcgttaagctgattgattgcttctgccagattatcaccgttaccacgggagacatactgtagcggttctcccatcaggtagcccgatttaaaagagacaatctcattagcccggttctccacaatatgattgcagatttcaggtcttacctctttctggcggttgagaatgggctgtatgcccctgtaataccaatagagataatcaatctcagagcggtttttccagtgataaggaagtgctttttgcaggatagtaagcacattgttcatggttacttctgtttcgtcagtcgtaatcatcattcttccatgcagtaccatacccacgttaaccacctccctcactgcacaaaatatcttctaacatgagtatatcatcctccaatgctcatttcaaggaaaaattttagataaccattgagggattaacaaggacgcttaaacacctcaacctttgcgccgacaagccccctgagttcattttccagcagagaaagggagtcaggagcgtcatcatgcggcactttaccagagcgggtgtatgtaattacctgcttaataaaagctgcatactgactgttcctcgcataaagagacgggtctttaaaataaaagtttttcaggatggtatcagaagcaaactcaattcttgtctgcttgttgctgatagtccttttcgttctcacattgcagacgtactcccacttcgtcataatatcctgcacgtcccttgcaaagtacgaacccgcattattggactcaaaggtacaggcaaccaccttgttatccatcagagcctttgcacattctggcttcgtcacctctgggggagagtcatcaaacaccacgtcaatgatatacacttcatccccatagaccgccgcaatcggcatagcgcaatagtcctcacctttatccgcagtatcgcagaccgcaatgatactgtcagggtcacggtcaatcggaagttcaaagaaacggttcaaactggcttccgggaaaagtaagcccttcgcttcaaaaggttgctgctgaaattcagactcaaactgttcagccgaaagcatttctctctggtcacggaaatactgcgtggtgaaaactttccttccctcacgcacatactcaaagttgctttcatccgtcacaaggtcaagagccggggtttcgataatcttcattcgcttaccctgcttacgcatttcctcttgtaaccgcccgatagggtcatacagagaataccgtgtaccgcaaatcacaatgggcgttccttcgattgcacgtccgataacgtcaccagaaataacctcccatttatcatcaagccgctgtctgttctttgcttcctcacgtccctctacacagtcatccagataaagcaggttcgttgcttcggaaagacctacctgccttgcgtcaatggaacggcacattaccgtggggaaacgggatttatggagcaagttaataatcttcgtatctgcgtttgtctgcaccaacttactctcagggaaaatatcataaaagtgatagtcactaggggtggtcatatattccaggcaacccaaatagaacgacttcacaaggtcatcacctgtaccttccatcagggtagagcggtcaggaaatttcccggaaagcatattggtaaagttgatacctaactgagacttacccgcacgtttcggcatggagatagagagaaagtccagctttccctcaagcacttcctgatatgcgtctacataccgtttcaggtaatgacggcggggctgatagaacttcttatcaagcggcttgccaaactccactgcctgcaagtaatcatcaaagaaatgcggcgcaccaaaaagtagagagcggaacaaaagattgtcgaactgttcagccgccagcatatctccatccgttacagacagacgaatggcagcagatattttctttctaaaagcctggttccatttatgagcctttgcaaaatcttccttctccatatcccggcagagggaaaacatatcctcatacggcactgggtcagaaggagactttcgcacagcattttcaatctgtgttttgattttcttatattccataatatcctcctgcaaaaaaaataaggactgtcatcagacagtcccattggacaaacggttgacttctcagccgttaatcatttcatatagaaaaatgtcattttcaagagccagttcctttgctttatcagtcagcttagaattggtcatcacgcccgctttgttggcatggtaatgagcctttgccgctaccacctcctgcacagcactgtttcccactttgttctggaagtgcttacattgaaatacccagcagtcaccctttttgtcataagctatcaggtcggctccataatccccggaagcaggggtgacagtcaccttcttaaatcctttctttctcagatagtcagcgcaatactgctcaaactcaagccccgtcattcctctcacgttatcattccattttggataaagcatgagggaataccttcccaccttcggcgttttcaacttgagcagtttgcagaaaacccacgccagaagaaacaaaggaatggtgaaaacattgaagcataggaagatgaatgagtatattgctatccagcagacccagcacaacagtttcatggtcttaaaaatccatccgaacaaaatcatccctccttgtagagtatttttaaaaatctctgtaagttctcttagatagacccttactaagaaaagttatacgaaaatcggattttcctctacaaaagtcactcagaaagagtgtattcaccttttccatctttctcacggacaaccaactcatatcccagtttactcaacatatcgttcagtttcccaatcgtcatgttgttggtctttttgggattgagtctgtcccagagtgcagcctgagtaatacccagagcgtttgccatttctgcattactcacgtccttctctaccataagagttttaaccaattcttttgctgtcatctgtatacctccgttctgataaaagaatatcactaaagttttaacttgtcaagttttaccttgaactttttttgtttttgcggtatttttgaccctcacccggctcggctcggcgtgggtcgatttcccccgcagggggtgcagccgccagggttccacccggtacgagagccagccagacgaaaaaaagtttgtaaaatttcaagttataacttgacaatcaagaaataacttgatatactttaatcaagataaaacttgatagcttgcaaggcaacagcccacgcaagccccactaaaaagaaaagaggttaaaccatgttaaagactaacagcaaacaagcccgcttgaatattcaagcctacatcaaaaaccattttgacgggtgcagctatgggattgaaaccccggacaccttcaaggaattatctaaaataatccttgacactttcaacagtgaaaagcccgcttgtggtagttattccagaatgacagagcaagaacgctttgaggaatgggcggcgggtctgccctctatccttgacacttgctattattacaatcgttccgcagtggatgacctgggcgcaatccttgaagaaaccgacagcgaaaaagcccgctacagtgagcaacaggcagaaaccagattgacatatttaatttatcgtgaacttgtaagggggtgcagataatgaggaaatacggacagagagaattaaaagcccttgtaaaagacggtgcagccgtcagccttaacaattacggttttgcagaaatgcgggattttctacaatctcacacactcgacaaaatcggttatagttccggggtgtatggtatcaatggcggattgcttaaagataccgaaaccgggaaactatacgccattacagcccgcaacacggctttaatgatggcattttaacaacccgttgcgccgggtataaatagccagttagggcgcaagcgttcccagggtgcaagccctgggaggtctggaaaaagtgggatttcaaacccgcagcaatgccagttaatagcacattgacaaaatgcacaaataggaggttaaaccatgaaagaatacacctacacagacggcgggcggttgttcgtccgtatcactaaaaccacagcccggaaagcgtacaacaacggcttgcgggttgtcctctgtccttcaaacttgcgccccggctttccatatcatccagaaataagcataagcggaaaagccgccgccagctttgaagaagctgtaaactcgtttgaatactacaatttgagaggaaaaaggaaccgtacagcgttttatatccctgttagaactgtagaccgtttcacaggtgaaaagcccacagcgggaaccctgggaaccgttcaagaatacgattatagctatataggacagtagcccacaggcaagccccgacaggcacacaagcccgccggggcttttctcagaatggaggttaaaagaatgtttaaaaagacctggacaacgccagcgggtgcagtatatgacctttacaacgatatgttacaacaacctcatttattagtagcaggcgcaacgggcagcggtaaaagcgttgttatcaatggcataatatacacagctttatttaaaagccctgcacaagtgcaatttatattgatagacccgaaacgggttgaactgatagactataaaccattgccgcatatactcagatatgccagtgagccgggggaaatggttcaagccttagattatgctatggagataacagaacgccgttataaagccatgcaagcccgccatgtaaagaattatgatggcggggcggtctatgttatcattgacgaattagccgacttaatgaccaccgcccgccgccaggtgcagcccattttacaacggcttgcacaagtaggcagggcggcaaacgtccatataatagccgctacacaatgcccgcttgcgtctgttatccctaccccgataaaagtaaactttgatagccgggtagcattaagaacccgttgcgctcaggacagccgaaacattttaggcgttaaaggttgtgaactgctgcccagatatggcaaggggtactatatgacccccgcaggcttgcaactgtataatatacccatgtacagccccgataaaataaaagaaatgttagactattggagacggcagaaaaagccccgtttaagatggttataacagaaaagccccgacaggctccacagcttgccggggtttctttttgccctctgtacgctccacacgttctacagagtcgctttaattgtagggttgataaagaggacagtcacgctatactggcggcttgaattttcagacagccgcctatactgcgccaaaatattttggtgaaacctctctatacggcggctcaatcttcggcaggagtttctataatctctgccgtctctgtctcgtccgatacctctactatatcggcggcttcaagatacttctgctttaaggcttccgtgtctttactgtctcccagaggattgttaggcgtgagaaccacttcggactggtctttcataccgtcatagttcttctgccagaaaataccagtgacggggtttatcttgccgtcctgcattaaaccctctctataaagcccgcaaatttgacgaacttttttgataaagtcagtgcggcgggggttccccttcgtcacattctcccattcccatgcttgttctttagtaatacctatagcagtatacgccgcctggtttcctactttcatatcccatgcagcgcacatttccagataattatagaaccgtctctccatttcgtccacgtcactataatcaagcggttccttcggggtaatagccaaaatgaaactaaccatcttcgcattataccccttcggcatttctcccttctgtccctgcataatgggggaattacttctcgctttctctaagttcttcggactgctttctttgtacccctctgtccgtctgggctttctgtccttgctgcccttcggtctccccatctttacgggcttttcgttttctgccattgttgctcacatccttcctataccgggcttcctctttctctcgtttccatctttcaacgtagctttccatgataaactccttcctgggctacagggttgtagagtaaaatcgtattttactataacttcttctatatacgcgcatactaagaaaacttataggaaaaagcgaaaatactctactaaactgctttcaaagccagtccatgatatactgtaacccctgcaataagatttttttcgtgataccattctgggtgcgttgtcagttctgcattgaatttcttcatactgcaaacataatacccgttgcttttacaccagattttatagttatcatacagcgttttagcttttgtatacccttcgtctgtaccctcacacttttcttcaaggaattgcagaaccaggtcattgtccttctcatactgcttgataaccttcttcatatcgtcacacattttcaaaccaaagcggcgatacttgaaatatccagttaccagccatgtaaagatacccttcatggcttcgggcgtttcaaaataatccttcaagcctttgtcctgttcttcgtctgagaagtgacggttgaactcaatgactctcacacggtcagaagcaaacaggcttttgtcctttactgcgggcaggtcattacaggagagccacattgtaaactggggcttgaatgtaattgcactctgatacagttcacgggcagtaatatcttcaccacctgtatactgctttattgtagcttcatccagcttgcccgccgtatcggactctgacatagtaaccattctttttccctttaaccgggcaagcacagggtttgcagcttcggcgttcttctgtctctcattgcggcagataagttccacaggagccacggtagagtaatcgcccagcaggtgttgaatagcgtccagcatagttgacttgccgttgcgggtggtcttgccgtgaaggatgaacatacattcctctttacccgttcccagaatagaatagcccaaagcccgctgcaagtaatctgctttatctttattatcctgagtgacttcctttatgaactgttcccatctggggcaggtgacttcctgcatagtataatcaaagttagtctgcattgtcagaaagtctttccagtcatgctcccggaaagtcatagtctcaaggtcataagtgccattcttacagttaatcagatacgggtgagtatcaaactcagcggcggcaatcgtcatgctgtcagcggcgtccttcatcatacggtcacgaaaccgcctgtcacccatcttcgacacaaagcccatatattgcttgcgcttttcttcgtcagggatttctccgcagtacagtgccataagccgcacaaactctttaatctttgaagataccagcaaagaaccaacgtctttctgccatctgccgccatcataggtataccatgatttagcttccgggcagtagcgggtatcattctggtagcactcagagaaaaggtctgccatccccgcttcatcccatgaatatcccgtagaattttcctgataaggggtttccgggtgaatggactttatgtaaaacatctttttgctgatttcctcagacgtgatatatcgcccattggaaagctgaaacaattcatcagccattacttttcactccctttctgaaataagtggttattttctgcccttccagcgggtacttattccattctgctgttctgcaaaactcaaaccgcttgaaacattcaccaaaggttaggttaaaatgttcctgtaccagattactttcaatccattcattgttatcccatgcctgttcatcaaacatctttgcatacctctcacaagtttttgtccaggtcattgtagatagcttccagtcgctttctgcttaacctgggctgcatgatgacttcgtgaagggcgttcatagcactcacggctatagcccggaagttatcagcaattctttcataatcctctcttccgtttgtatcccagggttcttctatccattcctgtttaatatcgtcaaagagttctttgcaatctctccccagccgttcttcaataatcctccccagaacttcttcctggtctccaatgacaacttctgtagagccatcattcagataaagtgttctcgccatactatttacctcctataccgtgtcacgctttccgtgatagtctggatttctctgtcctttaacggcggcttacactgcatttgatttaccttacagagttcggcgtatatctgcgcttttgtgtacccggtattgtgcaaggctcccgccagagacgtaagagagaggtttctgccgccagccgggatagggggatattcaggagcaagaggtattttgccgtctacgggcttctggtacataggggcataaatccgctgcaccgttgaagatttaccgtttcccgttttctctgtctcaggaaagtatttctgcaccacataatcaatagcttcctgattttctataatttccgggaagataagcaccttcccggtcattataaaaaatcgtctcgactgataaatctccacgcctttcagattattgcgtccgtgaaatggtaatttccctttcaggaagatatgtaccccacgtccacttcgggacttttctgtgtaagactggcagtgctgcataatatcagcgcaaagaggtgtcatcaaaccgtcatcaaagcccacgtcaatatctatccctacaaggtcactgcctgcaaatacaaatcccaagtggtcataaagcccgtcctttaccgccgcttctgcctggtcaaaggttgcccaggtttcaggggcggtagaggaagcagctttcttttcaaaggctttcatagggattttggaattatcccaggcacacacccactggggcaattttttcaattcttctggtattctggtataatccattaccccacgctcctttactctgtgtcggtgataagttcgctatacggcaaatctttaatccagccgcagaagtccagccattcattcagcttatgattttgccgactgtgatagatattcctgagaacagcatagttaagctgtaccgttcgtctctggttatatgacgtaggaagaagctgtatcatctgccaccaatacgccttatcctttgtgtccagatagcagtgacgggcttcattcagagccataatcacataatccagtgcttcactgtacatggggtcacagttcggaacatctccgatatgctccatactaaaatcatcataggtaaattcctttgcctgaattttgtgcattgtggagcaggaattagcaaccgtacccaccttataggtgtcaaactctttccaccaatagagaggggcggtaatgtcaaccgtgacggtaatcatccgcataaacttcccgtggtcgtttcctgatgccctcaactttttcatgagagccaggtcattttcacctattgcataacagcggtatggggtacagtcatgttctttgggaacacataccccttcacggtctacaatcccacatttaccacagtccacagccgggtagctgtcagattttgcccaagagttcaatggatttctcataccacgaatagctgtttcccagccgtaagtctctgtatgttcaaacttaatcattccatacctgcctttctgcgaaccttcatgtagtccttatatccaaggtcattcagttttgccgccttatgtaatgcctgctttttagtcccgtaggtattcgggataggagaggggttgcccacttcatggacataataacggctactccctctttccttcgcaatcgtgtattttagttccatctttttcagtttcctttccagttcttcaagaatgtaatcggggtttactttgctgagtagtgaataccagtcagaatgaaagaatctctttatttccttcacattacaatctgcggtctccacagcaaatccaccccgcaggtcaacatagtcatctgccgcctgctttacgattgcaattttcagattttcaataccgactggggagagtccccccccgtgactgctttttccattgctcatacatcacatggatttcctttctgcaatctcagccatctttgcagcattgagccgtgtatcgccgtggactctgctgtaagacagatagccgttcatgcggtctatctttgtcaagttcctgctgccacacttcgggcaaacgtccatttccaattcctggtgtccacagtcatcacagtacgccagagaaaggtttacaccttcgtaatatcccagcttcatagcccgctttaccagcgttcttacggcttcgatattgtaatctacagggtatcttacatactggattttcccaccgttgaacaggttccagaaccgcccctccaaatcctgcttctgaataggggtaatatcttcggtcacatggcagtgaaacgaattggacacatacgggcggtcagaaacattatgaataaccccgtattttttgcggaactgctcaacctgcaatccgcaaaggctttccgcaggcgtaccgtagattgcatacagccagccgtccttctgcttgaactcatttaccttatcgttgatatggttcataacttccagggcaaaggctccgtcctctgcaatggactttccgttatagagttcctgcaactcattgagagccgtgataccgaaagaggaagtcatgggtttcagaagcggcttgattttatcggtaggcttcaagtgaccgccgtaaaaacctccctcacagtaggcaatcggattggtactggctttcatttctcccagatattcataagtgcgcttgtgaatacctctaatcatttccagatagtagtcaagcacctcatagaagtctctgttttcctctcgtgcttttgccagtatcataggcaggtgaagggaaactgcgccgacattaaaccgcccgacatatacaggcttgtcatcttcgtcagcgggagtcatgccgccacgttcaaaccacggggagagaaaagccctgcaccccatagggtgaaccactctgccatactttttgtacatttcagccacataaccttctcccgtaagagagagccagtcagggtacatggtctttgcgctacactgaatacctgcttcaaacacgtcctcattgatacagccctcaccatgaaggttttcgtcatagaggaaaaccagcttcgggaacagaacgggcttcttattcccaggcttaccctgtccgtttttatgcacatcaaggaaagtgattgccgccatcttgccgaacgtatcagttgccagtccaaaggtcattgtgataaaggggtagtctccacgggaactgccaaccgtgttcagcttcatttcaatcccctggaaaccctgctcaaaatcacggcgtaccttctgcatagcccagtcccgaacttccgtagtaaaggtctgttgattgcggatttccatatactctgccgcatattttttgtaggatttctcagcatagggagagaggattttatcaacctccgggacggtaaagccgccgtactgctgagaagcagtggcaaggataatatctcccatcacatcaaaggcagtgtcaagggttttcggttcgttataccaaacatttcccatttcaaagccacctgtcataatagaagcaatatcgcagagacagcagttcatggtgtccagacgggcagactggtcatggatatagatatagccgtccttacaagcctgcaattcgtcctgagtcataaagaacttgcgatacagacgcttgttgagttcgttgaaaatcaagcagcgttttgtggcaaccagggcagagtccgtattggcattttccttatctccgataaaacggatagactggcttttctgatataccttgtccataagatgaacaaaatctttcttatagttacgataatcccgataggactttgcaactctcggctccacatcatccagaactttctctaccatattgtgcatttctgcaacgggtacggctccaaagaacttgtcattgaccatagcgttgactcttgccacaatatctgcatactggctttcagtcagctccaccatagcccttgcagcagatttatgaacggcgttcacaattttctgctcattgtaatcttccagtgttccatccttcttaataactttcatacagtaccacctttccctcctttaaagtttgcggtacatcaatcactctctgattgatagaccccgcccagtgataattaacgtctttcagttcttcctcaaagcgtccatccaccagaacgtccacatacttcataacggtaggaagatatttgtttgccataatttcatcccaagtgtaccccgtataaacccagattgtctttttcgggaaccgctgcttaatatccttcatcagaaggtatacacaggcacgattagaagggtgtagcgggtctccaccagaaaatgttatccctgcaatatacggtttcttgagagcattgaagatttccttcctttcacgcttcccaaataccaaaccgtcatcagggttccaagtgacgggattttgacagcccttacagtggtgttcacaccctgatacccagagaactactctcagtccgtcaccgttattcatatcatcatgggtgatattgtgatatttcattacacatcaccttctgccctatgaagggaatgttgagtgtcaaagccctctgggtaacgggctttcagcttatcaatgttaagcagcataacatcatccatcccaaagtccagtgcttcacacgcttctgcaatcatccacaggcagtcaccaagttctttcttgatatgctccttgtcaaacgggtgtccctggtacaccttctgtaaaattcctgcaacctccccagcttcggaagtcagaccaaaaacagcatggttcaaacggtcatccttcttatcatagggaatactgcaagttctcattgccaacttctgatattcatttccagtcatggttttatcctcccttaatcactgtgagtaacagaaaatccatattcaggcaggaagttgatttcataatggtatttatccacttctgcaccagaaatatcttccaccacataaagcgtatactcattcaggtaaacaaagtgcttttggtagataccgtcatcaacctcacaaataatttccagttcatttgtactgttattgctgagtgagaatgtgccaatcatttcaagcaataccgtatcagtgcgggcattgataacggtcagctttcgggttacattgaagttattggcttccttactgatattataggaaacctggtctgactcagtgcagcccgtcagcatacacattcccagaaccataaccatgagcaaagcaacaaatttcttcatagaaaatccctccttaaactttgagaatttttgccgctatcatatcggcagtatgagtgtagagtacgttagggtattgctcaatcgccgctccataagcgttccagttctccttactgtcataggctcccatgtgccacctgatacagagaatttcttcatccgtaaggtgaagaagcgactgagccataatgaccgacttatcaccatgtcccgtcaaagtaagccctgtattatactcgtaggtatcatcaggcttacgaatatagttgtcgcacttgcataggtcgtggagcataccaatcaggtaaggactctgaggacgcttccatttgagttccagccgttcagtgagggaaagaagcgttttggtcacggcaaagctatggtcaaacagccctccgggataattcccgtgatacttcgtagaagcaggagcgtcaaagaaaccgatactttcaaggtttgcaataagcagcgttaccgtctttttgtcaaagacctctttcataatctgataaaacagccgcacacgtccgtttttatccatgaataaacctccatttctttgtttctgatattttcagatataaccattggagagcttgggcgtaaaccttaactctccgcaggtcatctttctcaccctaacaaagtgtcaaggtcaaatccgcctttctttgcggtatgcgctgtctcaggcgggttcattgcgggggcaggcttcgtctccttcttaggcgcagcggtttcttcatcaaaaccatccgcaggctccttatcacccagccgcacaaacttgagcattttcccaggggtacgattgctttctacttcctcatggtcaacctcacaacgaataaaatgccctaccaaatcttcatggtcgatttccgtaagggaaaaatcattcagtgcggtctttgcaaagtagctgaaagcgttcaagccaccctggttcggctccccgttagagtccagcagagagaaccgttcgacgtgtttctgcccagaagcaagctgcatggtgacttccatcttgccaaaatcctctttatagttgaccttaacaatctggaaaacatgagtgcctttcgggataagggaaaacccctcactcaaaccaatttttgccattgtaaattcctccttatagttttcgtaatatatccagagattgtgcctttaaggtatcaatccgactggtatcgtggtagagttttcggaacaggtgttccaacatggtaacggcaatcgaattgccagccatcttataaatctgtgttttggaaataccattggacgcaagcacttcataatcactgtctgtaaatcccatcagtctgaaatactctttaggtgtcagctttcggtatctcccgttatcctctattttcacctcacgtccccccccactaacagttttcagtgttggggcaagcccttctggtgaatagatacggttcatctggtcattaccgtaatggttcaaatctgctgcctgaatgattttcataggcacaattatcactttcgggtctttgcagtctcttgataggagcgtggggcatatccccccctgtctgcaatatgaccagggtgtttatcattgtgagaaatgacgcttcgggtcttatcttctgaaagataaaatgcttctggcacatcatcctccaacatatcagcaaggcaacgtgtgagctgaatagggtcagggaactggaaagaaccattgtcaatatccttacggattgatacgataattacccgttcccgtgactgaggaataccataatcagcagcgttcattactttccagtagcagttataacctgcttcgttcagggagttcagaacaatatcgaaaattcctttcatgcttttactggccagatttttcacgttttctgcaatagccactttaggtttgcagtgttcgataatcctcaatgcgtcaaagaacaatccgcttcgggtctttttcccgtcctcacctacaaatccccgtttctttccagcaatagaaatgtcctggcagggaaagccgtatgtaattaagtcaacatctgaggggagagtggtttcatccacctttgtaatgtcccacagatttttactttcggggatatggtgtatcaaagaatatgccttacttgcgtacttatctatctcacaataatttatcagttcatacggtacgccaatgttgaaaagggctttctcaaaggctcctataccgctgaataagctgatatatttgagcaaagggcattacccccttctcttgttatgagaatgacggctttcataaattccgtagcagactgcaactccgataaccagagccatttctacaaacagagtagccagcactcccagaacaaacgcatttacatacataattacttatcctcccgtttcttcgctgtaaacctatattcagggttttctgtctcacttacatacttgctgtaaaccccatctttttccatagcttctacattgaactcctgtttcttcttcatggatacagaagttacccagttgtaagagccaccctcaatcgtcacggtcttgtcacccggtttaaactgtttgaccgcagccgccttaatcagttctttcagcttttttagccgcttctcgtcatctgcgattgtggcagataccgtttcgatatggctcataaggctttctgcttcttttaccggagcgtccaaatccgtgtcaggagaaaggttattgtctcgcagcactttcagaatatcagcgtcagccttttcatcatacttaggggacacgccgccctccacatgagttttccaccatttcttcacctgctcaatggtctttttcagggaaggataacgctcagacagcttgaagggacgaacaatcgtattctttgtgctacactgataatcttccgggtgttcataatccttttcctcaaggaaggaacacaccatgataacgtcatctacccccagaaggtaagcatagagagccgcctgtaaagcgtaatactcaggcacatcatccagccaatcctcactgcgcttcgtggttttcatttccagtacggtagtaggctttccgtccttatctaccagcaaatagtcccacattccaccaaagataggcgtatcatggaagaagtcaccccaggtctttttgaagtaatccttcccgtacacatctgtaggggaaatgaggttactcataaaataggacttcttcataaagtcagcctgtttcggttcgattgtcttaccagccacagtgtaaatggtgtcctcaaacggttcctcataggttcgggtgattgcacaccaggcattaaaaggggtagtccactggttcaatcccataatcgctgcaaaccgtgtacccgtgattttcttcggctttttcggtgggacaatcgtaattgtcttatcgtcattccacttcatggcttatccctccttaaacgtactctctccacagctttgaaaaagtgcttcttccatctccgccctttttgtttagccgggtaaatcccgcccgcaacatattgtgtcttgctacacttcgtctcagttttctcatggtctttttcctccaattcaacagctttattcagataccagattgcctttcttatatcctcaaacccattcttgcgcttgtgacggtagatatatttgagtgcattgcagatacaaaaactctttaccgcttccgtaccctgggtttccagcataacgtcaatacactcaaatctacctgtttcgtaatgggcagggtgatttacattgtcacccatccttattcctccgtaccgtaagactcaatcatttcaccaaggttcttgataagctgttcgcaagccgaacgggtcacaacggtaaagccctgagttttcatggcaatctgctgaacaaaatcttcctgagtctcgtccttttccaaaagttccttacaaaccttcttgagagccgcaatctgcaaagcgtcagcgttgccctcagtatcggtcagattttcctttgctgccttacgctcagtagcggtagctgggggcttctgcttcttctctttctttgcagtctcagggtttggggcgggaatttctgtttcctctgttccttcgtcctctgcccccagagttgcgtcaatgtcatcaggttccgtaatatcaagaacggtcatccagagatagcgccgcagatatgtaacggaagaacctaaagcctgcatggggtttgtgacttcttttccctgattgctgataatcggctttacctcacgataaggaaccgtgaaggacagcgggggttcattcacatcatccgtgttgaacacattcattactgccttatcatccgtaaactcaatgttggtagtaagaccgacacgggcgaaaatgcggattgccgggggtacaatgtcctccaattcaaaatacttgaactcaaggtgcatattcttaccagacttcttgattttctgattgaggaagtacagccttgcctttgccaacttctgccgtacattcattccttcatagatatttgccatttcaaattcctccttaaccattgtttctgggcttaaaaatactctgaacaacaaggaacaaaatccatagccctaaagccagtttccatgagaatacaaagccaaaacacaggcttaatatccatacaatgagtgctgccagtccaaaactgagggcttcaaggacaatgagtaaaagtaagagaagaagcagttccatcagcccatcctccttactcaaccacataccagtcatcagccagcatatcagtctgagaagcaatccaacctgtaacgtaggtaccgtcagcagctttcatatcaatgtgcggattgatagtaaccgtatcccgtttctcgttctggtagaatttcttgacttccttgaccttcatgtggtcagcaggaaccgtattaccagggcaaagtacaagaaacactcctttgccgttccaacccctacgggcaaccttcttaccgttcttgagagcagaaagggcgtaaccaaaggagtgaattttttctaccttcggctcctgcacaacctcccagtcattacaaagtccccatgccaaggtgtaaggaaataagtcagccgcaggaatttcttcaccttcctcaaagtggttaataagacaacctttgttgtccagataccaataagcatttttccactgctttaacttgatttttgctcccttttccatcatgggtgctacttctgtaaacttcatagtcttatcctccttaatcgaataatgctaaagacttctttttgagtgagttaatccgtctggtattttttctgggcggcttaatgcccaaaaagtcattgatatacttctttgccagtttgacataccactttcggtcaactacctctatggagagattgttgttattgtcaatggcacaatgcgtgggaagtccagccactttagcgtctctacctgtaacagcgtgggttttatagactgtccctttgcttttgtctgataccgcataaacacggttcaccttttgaacaattactttttccccgcctaccaggtgatagcactgagaatacttacctcccgcctttgcgataagctgaaaatccagaatgttctcacttgccgcaatggtttcctccgggggagtaccgtcaatgaaatactgctttattgcccttgcgactaccacagcattattgttgatattaaaggctcccgcaggagcaatcccccgcacaagctgtccacctttgaccttcggctccccgccgtcagccgggacttccacatagttgtttacgtccttctgaacaatcttgcgaataaaatcttcttccagttcaaaacctgttctgtcctgccattcctgggtgatttcctgatatttcgcttcatcctcatggtcaaaactcaccatgataccatctgtgttaagctgaatgattttcaaagtagaacactcagcaatcaggtgttcggaaagttccaagaggaaaagctgcccagaaatgcacacggaacgtcccatcagggggtcatacaggtcattgaacgctgttccgtccttaccgttcagcatggctccgtatgttgtattgagaaccagcttcaaagcatttgcagtggctttatcgcctgcctttttagcggcaactctttcttccagtgtgtcctcaaacatcttcggagacggcatgttacggctgcaataacccataagggtcatcaagtgcggatagtagcttgccacgtctttgttgcgaattgtgcgtgtttcagtggcttcctccacataggtaggaattgcgccgtgaataccaccataagcgatagtgcaggggcaaacacctaccataatttccagcttgctactgaacagttcatcattgggtatgcggtcatctttcatgcggtcaaagaagtcaaacacctcttgagggatatactgccgtaacagcttttccgggtattgatagttcctttcgtcattccagggcttttcaggtttttgcgctttcagataaacagaagtcagttttgcattggtcatgtacattgcctgtctatctgtcaggtttctcgttttacccagagtgactttgtttttcagatacgcttgccgcaggtgatatagcttctcagtagcgtccacgtcatatttgcagtagtaaatggtttcctgcaattctttctctgagagcctatgagtgatattgaagtcaacctcagtttcctcaatcggtattcccaggtgggcttcaatcgctttaagagacaacccaacctggcaatcgtccataaggtcaaagctgtcaaagtatactctgtactctctgagaacgggtatatcccatccgttgacttcctccacaatgataaggtcattgatttccttaatctgttcgggagtaagcccgcacatcaccccttttaaaatgaaattgtcatagtgcttgttgttaaatcctcccaggaacgggttgcgctccatgaaagcaactacagcgtcattgtcattatggataactgtgtattccccagtggctatctctttgaaaacgaacagccaatcgtgagcgaacacctcacagtcaaagataaaaatgtcattttccatcattcaccctccaatatcacgcaaccgcacttacgataactcgtgcagcgtttcttgaaggatttctgcaatgaccgtatgtagtctacatagtcgtatgcaatgggttgttccttcccgtcaaaggttctggcaattcgtcccacactctggactatgactgcataatccttttgtggcgtggtcagataaagcctatccaaccggggtatatccagcccttctttcgccaaagcataagtggcaaacaggtaatgcttctttccagagcgcatatcttcaagtgcctgttcccgttctgctttcagctttttggtagtcattttcccatcaatcaccgccgcccgaactttaagtgccaatggcaaactttcatacaggcttctcaggtggtcaactctgtctgagaggatgaggttgtaatggtcacagttttccaaaaggtcatccatgataatctcattccgttcctcattctcagtcaggtaagtaatcatcttcggataattgatagtgccgtcactgtttaaaaaatctgaactgagttttacccctgtccctttcggctgcacatgaactgtcattatctttgatttcacagcttcatcaggaacggtataaaccacttccccaagcattgcgtaggttgcctttatcaatccgtcagccctatgcaccgtagcggatagcccgtatttgtgccttgccctgagagcgttcagaacccttgagaactgcgtgaccgccgtgggcgttccgcttactctgtgacattcatccacgataatacagtcccaggtatcacggtattgttccaaatccagtttgcacatggtctgtatcgtggcaaacgtcatagccgccccgatattgacttttccctctgtaatggttcccatgaggtcaggagagaagtattgttcagccctgttcttactctgggttagaaggtctttcgtatgggtcagccaaagcgtcctcacacctaaatcactggcaagagcaattcccatctgcgtttttccgcttccagcgggggactgcaagataccgtaatgatttatcagcatggctcctacagcttcttcctgatagtcgtataacggcacagagccgccatatttgacgtttcttttttcagggaagtatttcattacctccccttccaaaagcggcaggatagccctcagacagccgaaaggaaggattatagcgttgccctcaatctcatatagaatgagcgtcctgggcgtgtttcccagccacaaattcatccttgctttcttctgatactctgggttcggcatttccagatttttcttgcaccaggcaaccagttccggggaagggtcagtgattttcaaacggcttccgatttccgttatcattcaaattcctccacccactgtttgaaggtcttgaactctgggaactctttttcagtaatactcccttcaccgtataactcccgcaggcaaagttcatcaaaatgtaccatgtaaatctgccctgtattcagccgcatagcaaagtaacaatgctcattccctgtagcttcccagcgggtcatagccccttcctggttcgcttcaatacgagacagggtgaaaatgttattggcacagtccttgcagtcaatcagtacgggaataccatttttgaccgctatcacatctgcgggctgccctgtctggttctgcgccatattgtgcgcccaccatccatgttcagccagaagtctacagagttcttcttcaaactgatttcctattgttttgttcactcgcttcatgtagtacctcccctacaccccacaagggggtgtagattaaagaaccctgattttgaaagcgggacgaacgccactagaggcagaagcgccgtggcagcccgcatcgccggagccggcgacaaaggcaaagttagcagcagagtctctacacttattctggagccagtaccattcccagccaccattcttaccctgaaatgcaatgcggttccgtctctgcttcataggcttccactgctgcacatacggactctcgtactcgccatagtagttctcaccgaaaatctctttttcagttggcagacggagataatctccatttccgaaagaaaccatcatagccttaatgtcggcagggaagcgggcaataatctcagtgttcagcttctttctgaggtcactgccctcatagccgccctcattggtgttcgtatcgttcacggaatactcgtcagccaagcagtccaccagacagaacaacataccgtcattttcctgctgtaccgccattgcctgtaccttttcgccgtctgtcagtttgaacttgataatatctccaacccggaaagtatcaacgtcagacttaatcattctttttaccttcatggtaatatcctccttcaaatctcttgccgtacttcttcaagtaccattcttcaaattctttctggtgttccttgtcctggaagtaggctttaacccttttcgcaagcagggaacccaaagcactttcttccattttcggaaacattacttctcgccaacgaggacagaaccctgttcgtaactgtccagaatatcgttggcagtctggatgattgagtcggcttttgccccgttcctcaccccagaaatgacagaactcatttccgtcttgtccgtgacaatgcccctcatgcgtaactggctgataagccaaacgtaagaaagactgtgcttcctcaatcgttcacgaatattctcacgttcctccacgtctcatgtacctccttcctttgagtattcttgtaaacaatagttgacagagaactccccaaaggttataatgaagctaccacactcataaaccattgagaactctccgggcaaaaaatatatcccagaggggcgttattcttttgcctttttgtaaacaactcttgttgacatactcagtataatcccgtaattagggattgtcaacccctaaatttaaaaattaggggaatattttgccgtggagtcctcaatttagggaaaggagcttttagcatgatattctcacaaagattgaaaggacttctgagcgaaaccaaaaccacatggaaagaagtcagcatgaccttagatattggtaaaaatcagcaaaaatactgggaagataaggatattgcccctgacgggaaaacactatgtaagttgtgtgaatacttccatgttacttcggattatctgttaggtctgagtgacagcaaaaccccgcaaggggataatctcacggaagaagaacgccttttgctggaagcctaccgttcagccagcacccagggacgcttccacatcattcaggtttgcatgaatgaaaaaacagccgcacccaaaggggaggtagttgccgggtgattgacttagcggaatggaggaagaaccatgtatgaggatataaaaacagcctgcctttacgtcagattttccagccataatcagacggaacaatccattgaagggcagaccagagtgtgccaagagttttgccagcggcacaatatcaagattgtagaaatttacgcagacagagccacgtctgccagtaagaatactgagaagcgtgtttcctttctcaagatgataaaggactcagagaagggattgtttgacgcagtagtggtctataaattagaccgtttcgcccgttcccgatatgactcagccacatataaataccgcctgaaaaagaacggcgtacagcttatctcagccacggaaaacataaccaatagtccagagggtattatccttgagtccgttctggaaggtatggctgagttctatagtgccgaactctcccagaaaatcaatcgtggtatgcgggagtcagcctataagcacaattccataggcggcgcactccccctgggatataagaccgtggataagaagttggtcatagatgaaaagaccgcccctattgtgcgggaagcctttaccatgtatgcagagggtcacagcgttgcggaaatttgcaggatattcaacgccagagggtataagacctcaaagggtacagagtttggcaaaaactcattcagtaagatttttcgtaatgagcggtatatcggcacatacacttaccatgactacagagcagaggacgctataccagccatcattgaccgtgacttatgggacagagtgcaacttcgcttgaagaaagtaaaaaactctcccggcagaaacaaagccaagagagtttatctgttatcagggaaactattctgcggtcactgcggagaatcaatgaacggaaactgcaacggaaacaaatatgcgttctatgagtgctatgggaagaagtcaaagtataacggctgccaaaagagaaacctgcgaaaagaatatattgaaagactgatagcccaggacgcactctctttgctcacagacgaaaatatagaacaccttgccacggttgcctgtgagcgaaacgactatgagattgagactggttcacccatccctgttatcagagacagaatacaccaaactgaggtctctatcaataacctcaccaaagcgattgaaacaggagccacgccagacgcacttgtaaaacgtatggtggagctggaacgggaaaagaaagacctgtctacccaactgaaaaaggaagaagaactgattgtgccgcttgagaaagagcaggtcatattctggcttgagaagttcaaggacggggatattgaggatgaagaattttgcagactgctcatagacctctttgtaaactcagtgaccgtatgggatgaagataacgatatgctcaaggtcacaatcgcttataatctcacctctttaccgacaaaaacgtaccgccttacaaaagacggtacgttgtcggatttcacgggcaatgcacctgctttcgaggtactccgcgacctcttcctccagctttttctccaagcagaccgcatacgcctgatcgtccagcacgcgcgtcacgggcctttccccctgtgccgcgatgatttcggggattctgtcccgtaccagcttgttataatccatcgatattttcccttataaacacagatttttccatcgcgttttctgcataagccgaaaggagaagctgctttctttaaacagcctccccttttcggaatctttcgttttttctaaggtttatttcgccggcgtatcggtcgtgaagaactccttcatgcttgtggcaagcccggcgacgccctgaatgttcgacgggatgatgatcttcgtcgccttgccgtccgcggccttttcgaacgcctcgaggctcttgatcgtgagcaccgcctcgttcgggttcgcctcgttcaaaagcttgatcgaatccgccagcgcgcgctgcacagagagaatcgcctccgcctcgccctgcgcctcgcggatcttcgtctcgcgcacggcctccgcgcgcaggaccgccgactccttctggccctcggcgatcagaatcgcgctgcgcttttcgccctccgcgtcgagtatcttcgcgcggcgctcgcgctcggccttcatctgcttctccatcgagtcctgaatttccgccggcgggatgatatttttcagctccacacggttgaccttgatgccccacgcgtcggtcgcctcgtcgagaatcacgcggattttcgagttgatgacgtcgcgcgaagtcagcgtgtggtcgagctccatttcgccgatgatgttgcgcagcgtcgtcgcggagaggttttcaatcgcggagagcgggcgctccacaccgtaggcgtacagcttcgaatcggtgatctggaaatagatgaccgtgtcgatctgcatcgtgacgttgtccttcgtgatgaccggctggggcggaaaatcgatgacctgctccttgagcgagaccttcttcgcgatgcggtcgataaacggcagcttgaagtgcatgcccgtgccccaagtggtgtggtaagcgccgaggcgctccacaacataggcgtgcgcctgcgggacgatcttgatgcaggagatcaaaatcgcgatcaccacgaggatgagcagcaggaagccgaccatgccgaagccgaaatccatcattaaatcattcataaacgtaccttccttttcctcaatttatgtgttattttcgggcgaaacgatcagcttgacgccttcgatgcgctcaacgcgcacctgcgcgccggccggaatcgccccgccgtcgaggctgcgcgccgtccagtcgctgccgagcacggatacgcgccccttcgcgagcacgttgtcgatcggctccgtgacaaccgcggtgcggccgacaacgcggtctgcgttcgtgcgcgtctccttcccgcgcaggaagcgccggacgagcgggcgcgtcgccagcagaagaatcagcgtggccaccgccgccgcgatcacctgcagccagaacggcgcgtgcaggaaatgcgcgataaggccggccagtccgccgcctgcaaaccagatggagacgagctgcgcggtcgcagcctccagcgcaatggcgatgatgatcaccgcggtccatgcgagaatttccaaatcgatacccccttacctttttcaaaacgaagcactgcgtggcgccctgcctgcttcgttacctatagcatacaggatttttgtgcaatttgcaagtgaaatccgcacgaaacggtaaaaagcggccccgaaaacaccgcatgaaatctacattttttcggggcctcacgggcaaatgagatgaaattttaaaaaatcggtcgaagttgggctgtaaggcccgcctcacatgatctgcgcgcccgccgcataggcgaacaggtagacaccgagaaaaacaccctcgagcagaaatacactgggccgcagggccggtcttttttccagcagcacggcaccaaagaggaagaacgggaacgcacaggcaagatagcgccccgcactcagcagccaagagagcgaataattggctgcgagataagcgaacgcatagagcagcagcccggtggaatgccgacgatcccgtacggcaaagaacaaaacgctcccaaatacgaagaacagcacgagctccggcaaccaaaccgcccagccgatcgaagcgcccgcattttgcaggaagttctgcgcgatatagtcgagcacctccggcaagggcaggaaaccctgataccaatgcgtctggtggcccacgaaggcaaaaaagtccccgtccacataccaattcagaagtaggtagaccgccgttccgagcagcggaaccagcaaagccgggaggcggcgcaaaaacggccgcaccgcttttttcagcgcgccgcccagcggcggacgaaacggctgcagcgcttcgaataggacagccgccgcgggcaggatgacaagcacgccgaccatacgcgtcagtgccgccaaaaatccccagaccgcatacggcagccaccggtgctgtatggcgcagcagcacgccgcggatgaagttagaagaaaaagcccctccgtcatgaccgtgccgaaaaagaaggaaaatggatagagcgagagcagcctaacagcatctgccgccacccgtccgccgaagcacgcggcggccagtcggtatacccagcagcacccccacgcatagcagagcgttgaaacaagcatgcccgcagccgccgtatccggcacaagaagccgaaccaaccgcaccacccagacataagccggaaaaaagacgaggaacaggtgctgtccgtcctccatatatcccgcgtagccctgctcgacaagctggatgtagtgcccggcatcccatcggttcatcgcgcgcatacacgccggaaaatccatctccgtctcagactggagcagcacgcagaccaccatcgccgcaaacaaagccagccgaatccccagcgcccccagaaagatccggcgcagtaccgtgccatcgggcgctgcgccgtctgccccgccctgtggcgcggcaaaaagccgcctgaatttgcaatccgggacgccgaaggacgccagacagcgcaaacccaccagaagcgccagcagaccggctgctgccgctgaaaccaccttgaccaccatacccgttcccccatgataccgcaggcggccccaaatacgtgaacgataaagcagactttttcgttcagccgtgctataatacaaaaagcaagcggctgcgcacaaaaagccgcgtaaaacttccgccgcacgcgcgccgcgcgccgaacgaaaatttctagtttttccctcaatcgggacataaatccttcatcaaagcaaacaaagggatgacagacgtctgcctgccatccctttgttttccgggccgaacggccgcgggaattttataggttatcggatcaatacatgccgcccatgtccggcgccgccggggctgccggggccggctccttgatgtccgccacgagggactcggtggtcaggacaacggaagccacggaggaagcgttctgcagcgcggagcgcgtgaccttcgtcgggtcaacgatgccttcctcgatcatatcgccgtaaacatcggtgagcgcgttgtagccgtagccaacggttgccttcgccttgaggtgctcgatgatgacggagccctcgacgccggcgttcgccgcgatctggcgcaccggctcctcgagcgccttgagaacgatcgccgcaccggtcttttcgtcgccctcaacggaatcgacatacgccttaaccgccgggatcgcgtcgatgagcgcggtgccgccgccggcaacgatgccctcctcaacggctgcctttgttgccgcgagcgcgtcctcaatgcggagcttctgctccttcatctcgacctcggtcgccgcgccgaccttgatgaccgcgacgccgccggcgagcttcgcgaggcgctcctgcagcttctcgcggtcgaaatcggaggtggtcgtctcgatctggcttctgatctggctcacgcggctcttgatggcctcgctgtcgccggcgccgtctacaatgatcgtgttctccttgtcgatcttgacctggcgcgcacggccgagctggtcgaccgtcgtatccttcagctcgaggccgagctcgccggagatgacctgaccgcccgtgagcgtcgcgatatcgacgagcatttcctttcttctgtcaccgaagcccggcgccttgacgccgacgcaggtgaacgtgccgcgcagcttgttgaggatcagcgtggtgagcgcctcgccctcgatgtcctcggcgatgatgacgagcttcttgccgctctgcacgatctgctcgagcagcgggaggatctcctgaatgttcgaaatcttcttatcggtaatcaggatgtacgcatcgtcgatgacggcaaccatcttgtcggtatcggtgaccatgtacggcgtgatatagccgcggtcgaacatcatgccttcgacgacctcgctgtacgtctcagcggtcttggactcctcgacggtgatgacgccgtcggacgtgaccttctccatcgcgtcggcgatcagctcgccgatctgctcgctgccggaggaaacggccgcaacgcgggcgatgtccttcgtgccggaaaccttcttcgagttctgcatgacagcctcaaccgccgtgtcggtcgccttctgcatgccctttctgagcaccatcgggtttgcgcctgcggtgacgttcttcatgccctcgcggatcagcgcctgcgcgagcagcgtcgccgtcgtggtgccgtcgcccgcgacgtcgttcgtctttgtggcgacttccttgacgagctgcgcgcccatgttctcatacgggtcctcgagctcgacttccttcgcgatcgtcacgccgtcgttcgtgatgagcggcgcgccgaacttcttgtcgagcacgacgtttctgcccttcgggccgagggtgatcttaaccgtgtcagcgagctggttgatgccgctgagcagcgcctttctggcgtcttctccgtaaataatctgctttgccatgatgtgaaattcctctctttctgcttcgaggcgtgtgttctatgcttcatccatacagagcgccggccgcctctccccggcttttgaaagccgcgcggcaaaacgcgccgcgcgcaaaacgatatttctcttactcgacgatcgcgagcacgtcggactggcggacgatggtgtattcctcgccgtcgatcttcacttccgtgccggtgtacttgccggtgatgacgcggtcgcctgccttaagctgcatgacaacctccttgccgtctaccatgccgcccgggcccacggcaattacgcgcgaaacctgcggcttctcctgcgaagcgctggtgagcacgatgccgctctttgtggtttcctcggccttttcggcctgaatgagcactctgtctgtcaaaggtttaatggtcatggttcctacctttcggcgccgaatcctgcgccgtatcctttctccccgcattttaaaatctgtttccgcgcccgcggagctttgcgcgaaacccgccgccggccggcggcggtaaagcgttgcatggttaaaagccgccgcatcctgtcggaccgcttggctttagcactctttatccccgagtgctaaacttattctaatcactaggtcaagaaaagtcaataggtatttccagaaattttcacttttaacattttagtaatatttaggccttttcaaaccgcggcccgccgctgcactgagccggaaacggccttttgacccggctgtttttcagcttccccggccgcattgccgcttgacgcacggcgcttctcctattataatgaagctaccggcccgccaaagccaattctgcggcgcgccgccgctacaattctttcgttctgcacacaaggcccccgccgcgtggaagccgaaatcatacggaacaatcggacggaccgtgcccgtctgcctgtgcttcccgtattttcggcgggaagcattttttgttgcccgcggcatgaactctatttttagaaaggacggttgcatatgcagacgcgcgttgcggttatgagcatcattctggaggacagcgcctgcgccgaggcggtcaacgccgtgctgcaccagtacggccggtacgtcatcgggcgcatgggcatcccctaccggcagaggggcatccacatcatcagcgtcgcggtcgacgccccgcaggacgccatcagcgcgatggcgggcaagctcgggcgcatcgccggcgtcaacatcaaaacggcctattccaacatcacaggccaagccgaggaggaaacgcccgcaaagtaagggcgatccgataaaaaaactaacgggaaagccgcggctgccccgaaagaaaggaaccaccgttatgtacgatccgaaatccatgaaagccgaggagtttatctcccacgaagaaattgaggcgaccctgcggtacgccgacgaaaactgcagcaaccggccgttgatccgcgaaattctcgacaaggccaaggaatgcaaaggcctttcccaccgggaggcctcggttctgctcgcctgcgagatccccgaggtcatcgaggaaatctacgcgctggccggcgagatcaaaaagaagttctacggcaaccgcatcgtgatgtttgcgccgctctacctctcgaactactgcgtgaacggctgcgtctactgtccctaccaccaccagaacgggcacatcccgcgccgcaagctgacgcaggcggaggtcgcgcaggaggtcgtcgccctgcaggatatgggccacaagcgcctcgcgatcgaggccggcgaggacccggtgaacaacccgatcgaatacattctcgagtgcatccagacgatctacggcatccagcacaaaaacggcgcgatccgccgcgtcaacgtcaacatcgcggcgacgaccgtggaaaattacagaaagctcaaggaggccggcatcggcacctacatcctgtttcaggagacgtaccacaaggagagctacgaaaagctgcacccgacgggcccgaagcacaactactgctaccacaccgaggcgatggaccgcgcgatggagggcggcatcgacgacgtgggcctcggcgtgctgtacggcctcgagctgtaccgctacgaattcgccggccagctcatgcacgccgagcatctggaggccgtgcacggtgtcggcccgcacacgatcagcgtgccgcgcctcaagaaagccgacgacatcgacccgacaaagttcgacaacggcatcagcgatgagaccttcgcgaagatctgcgcgctgatccgcatcgccgtgccgtacaccggcatgatcatctcgacgcgcgagagccagaaggtgcgcgagcaggtcatcaacctcggcgtttcgcagatcagcggcgcgtcgcggacgagcgtgggcggctacaccgaggccgaccgcccaaccgacaccgagcagttcgacgtctccgaccagcgctcgctcgacgaggtcgtgcgctggctgatggaaaacgggcatatcccgtcgttctgcacggcgtgctaccgcgagggccgcaccggcgaccgcttcatgagcctgtgcaaaagcgggcagattcagaactgctgccacccgaacgctctgatcacgctgaaggaattcctcgaggattacgcgagcgcggagacgaagcgcatcggcgaggcgatgatcgcgcgcgagctctcgaacatcccgaacgaaaagacgcggggcatcaccgccgattacatcggcaagatcgccggcggcgagcgcgacttccggttctgagcgcccggcatctccccgcattttatacagaaaggctggcaagaaacatggcaggactgaatgaaaccgcctcgggcgggcgcgtgcacatcgcgtttttcggcaggcgcaacgccggaaaatcgagcgttgtcaacgccgtgaccgggcagccgctctcgatcgtctccgacgtaaagggcacgacgaccgacccggtgcagaaatcgatggagctgctgccgctcggcccggtcgtcatcatcgacacgcccggcatcgacgacgagggcgccgtcggcgcgctgcgcgtgcagcgcgcgcggcaggtgctgaacaaaaccgacgtcgccgtgctcgtcgtggacggcgcggccggcatgcagccggaggacgaagcgctctgcgcgcttttccggaaaaagggcgtgccgtacctcacggtctacaacaaatccgacctcaaggcggtcaccccagcggaggaaaacgcggtcgccgtcagcgcgctgaccggcgagaatatcggcgcgctcaaggaacgcatcgcggcgctcgcgcagaccggcgccggacagaaaacgatcctcggcgacctgctcgagccaggcgaccacgccgtgctcgtcacgccgatcgacgaatccgcgccgaagggccgcatgatcctgccgcaggtgcagacgatccgcgacattctcgacgcaggcgccacctgctcggtcacgcaggcggagacgctgcccggcgtgctcgcgggcctgaaagcgccgccgcggcttgtcgtcaccgacagccaggcgttcggcaaggtcaaggcgctcgtgcccgaagcggtgccgctcacgtcgttctcgatcctcttcgcgcgctacaagggcgtgctcgagacggcggcgcgcggcgcggcctcgatcgagacgctgcgcaacggcgactgcgtgctgatctccgagggctgcacgcaccacaggcagtgcgccgacatcggcacagtcaagctgccggcgtggatcaaaaagcacaccggcaaggcgctgcggtttgaatttacatcaggcggcggttttccggaggacctctccccttacgcgctcgtcgtccactgcggcggctgcatgctgaatgaacgcgaaatgcagtaccggcagggcttcgccgaggaaagcggcgtgccctacacgaactacggcattctgatcgcctacatgaacggcattttaaaacgcagcctcgcaccgtttgaggagtatgcggatctgctctgacgaggcgaagcccgccggccaaagcgctccatagaaaaagcggctgtaccgaaacccggtgcagccgctttcgcatgccttgaaaaaggctttattagtattttcagacctcgagcatcgtgatgacgtgccgcgggcaggcctcggcgcatttgccgcagccgacgcacttttcgggatcgaccttcgcgcagaagttctcgacccgcacggcgccgtattcgcacgatttcacgcacttcatgcagccgatgcagccgatcttgcacaccttcgtcgtctgcgcgcccttgtcgcagttcgagcagcgcacgacggcctgcttcttgagcggcacaaagctgatgagccccttcgggcaggcggcgacacactgcgcgcagccgcggcactttttcgggtcgatcgccgccatgccgttgcagacgctgaccgcgccgtagggacacgccgccgcgcagtcgcccatgcccatgcagccgaagcggcagctcgtgatgccgccggccagaagcgtggaggccgcgcagctttcgatgccgtcgtaattcatcttgtcgcccgtcatatcgtagctgcccatgcagtggacgagcgccgttttcttttcgaccgccacatcgccgacgccgagcagcgcggcgcattctttcgcacacgcctcgccgccgggcgagcagagaccgaccttcgcctcgcccttcgagagcgccgccgcgtagccggagcagcccgagaagccgcacgcgccgcagttcgcgccgggcagcacctcgagcagcgcctcggccttttcatccttcggcacagccatgacgatggacgcgatcgccagaatgacgccggccacgaggccgatgcccgaaacgatcaatacgggaatcagaatttccatattccattatcctttcatactcagatgcgcctcaggcgagcaggccgtcgacaatgccgttgaagccgaggaacgagaccgccacgagcgaggcggcgatcagcgtgatcggcaggccgcgcaggaacttcggcacgtcgcacagctcgagccgctcgcgcacgccggcgaacagcaccatcgcgacgaggaaaccgacgcccgcgccgaacgcattgacgagcgaggccgcgtagccgaagctcgcgtccgcctcacctttttcgagcaccagcatcgtgacgccgagcaccgcgcagttcgtcgtgatcagcggcaggtagatgccaagcgcgttgtagagcggcggcatgtatttgcgcatgatgatctcgagcagctgcacgagcgccgcgatgatcaaaatgaaaacgatcgtctgcaaatagccgaaatcattcggcacgagcacataggtgtataccggccacgtgaccgccgtcgcgatgaccatgaccgccgtgaccgcgcagctcatgcccacggccgtgttgagctttttcgacacgccgaggaacgggcagatgccgaggaatttattcaaaatgtagttttcggtgaggatcgcggcgagaaaaacgccgactaaaaatttcaggtccattacttctccccgccctccttttcacatttttcctgcaccttcgagcacgaagccgcaagcgggcacgcggcgcagcccgtcgtttcgggcgccttgcccgcctcggaaagcctgcccgcaaccgcaactaagatgccgaacacgaagaagccgcccggagggagcaggaagatgacgatcgggtccatgaagccggagagcaccggcaggccaaacacggtgccggcgccgagcagctcgcggatgatgcccatcgcaagcagcgccgccgtaaagccgacacccatgccgaggccgtcgagaatgctcggcagcacgcggttcttgcttgcgaacatctcggcgcggccgagaatgatgcagttgacgacgatcagcggcagaaacacgccgagcgccttatcgagcgcgggtacgaacgcctcgatgagaagctgcacgatcgtgacgaagcccgcgatgattgtgatgtacgccgggatgcgcaccttgtcgggaatgacctttttgagcaaagagatcgccgcgttcgagcagacgagcacgaacgtcgtcgcaaggcccatgccgatcgcgttcgacgcggccgtcgtgacggccagcgtggcgcaggtgccgagcacgaggcgcagcaccgggttttccttcacgatgccctttgtgaattcctgtctcaggttttttgccatctcacgcgccccccttcatcgcattgtactgctcgaccgccgcgttcaccgcgtccgtcaccgcgcggctcgtaatcgtcgcgccggtcagcgcctcaacctcgcccgccgcgggcgctttattcttcacaagcgcgatgccgttttccggcaccgcctgcttgtactggtctgtaaacgacgcgcgctcggcattcgcgccgaggcccggcgtttccccatggctcaggatcacgacgcccgtgatgctgcccgcagtatcgatgccggtcatcacctgcaccgtgccgccgtagcctttcgcctcggtctcgaacacatagccgacggtctcgccgccgctcgtgcccttgtagcagccgtccgccgcctcgaaggcttcggcgtccggcagaacgacgcgccgcgattcctcggccgtgattttcgcctgctcggcgatccggtcctttgtgagcaggttcgtcccggcgagcagcgccgtgacgatgaggcagatcacgaaaagcgtgagcgccggctttaaaacggagcttgcctgcaccttcatttcgcacccgcctttccggctttcgcgctgccgagggcacgcggcttcaccgcgcgctcgatcagcggcaccatgatgttcatcagaacgatcgaatacgaaacgccctcgggcaaggaggcgaactcgcggatcagaattgtgagcacgccgcagccaatggcgaacacgatgcgcccgccgaagttgatcggactcgtcgtgtaatcggtcgccatgaagatcgcaccgagcatcaggccgcccgaaagcaggtcgaagagcgggtcgcgcccgagcacaagcgagagcgccgcggccgaagcgaggtatgtaaccgggatcaccgggctgatgacgcgccgcgcgacgaggtacacgccgccgagcagaagcgccagcgcgcacgtttcgccgaggcagccgccggtgttgccgaggaacaggtcgaggtacgagggcagcgccgcgcccgtgccctccgagaggatgccgagcggcgtcgccgtcgtcaccgcgtcgaagtagctgtggtccatcggggcggtccaggcggtcatcttcgccgggaacgaattcatcaggatgatgcgcgcggtcagcgccgggttcacgaagttctgcccgataccgccgaacatctgcttgacgacgacaatcgcaacgacgccgccgaacgccgcgatcagcgggctgatcgagacgggcaggttcatcgcgagcagaatgccggtgacgacgcaggagaggtcgccgacggtctggcgccgcttcatcacgacgcgcgaaaggtactcgctcaaaatgcacgacgcgaccgacgtcaggatgataaccgccgcgcggaagccgaaaataatcaccgaagcgatcatggccggcgtcagcgcgatgatgacatccagcatgatgctcgaggtcgtgtccttcgcgtggaagtgcggcgaggacgaaacaatcagcttattcatttctttgcaccgtcctttttcacatagagcttgcccaggcggatcgcctgcacgagccgccggcccgccgggcaggaatacgcgcagcagccgcactccatgcagctcataatgtcgagggatttgagcgcctccacatcgcggcgctcggcgtatttttcaagccttgtcggcagcaggcgcatcggacatgccgcaacgcagcggccgcagcggatgcactccgtcggctccataagctgcgcttcgcgcgcgccgaaggccagaaggccgttgttctgctttaaaacgggcagttcgtccgtcgtaacggcgacgcccatcatcggcccgcccatgatgatcttcttcggctcctcgcggtagccgccgcagaatgccatgacctccgcgatcttggtgccgaccggaacgatgacgttctgcgggttctgcaccgcgctgccgtccaccgtgacgcgcttgagcgtcagcggcatgccggttttcatgtagctcgcgaggaacgaaaccgaggcgatgttcatcacaaggcagccgacatcggccggcaggccgcccgcgggcactctgcgccccgtgcacgcctgcacaagcaccttttccgcgccctgcgggtacatggcgcgcagcggcagcacgcgcacctcgtcgttcgggtcgagcgccgcgttgtcggcgatcttccgcagcgcctcgatcgcgtcgggcttattgtcctcgatcgcgatcagcacgcggtgcacgccgaggatctccttgatcttatatacgccgtgcagcacgttttcgccgttttcgagcgcctcgcggtgatcggaagtgatgtacggctcgcactcggcgacgttcacgatcagcgtgtcgatgctcttgccctccggcacattgagcttcacgtgcgccgggaatcccgcgccgccgaggcccacaagcccggcgtcccgcgcggcctgcgcgagctgctgcttcgtgcggatctccggcggcggcgcaatcgcggggtctcgctccatcagcccgtccgaggtgatgacgaccgcgtccgccatctggccgccgggcatcatgacctttgcgatctccttgaccgtgccggatacggaggcgtgaatcggcgccgaaacgtaggcgtcgctgtccgcgaccttcgtgccgacgtacacgtggtcgccttttttcacgacgggcgtgcacggcgcgccgatatgctgcgtcatcggcagcgtcacttcatcgggcggcggcatgacgcgcgtttccatatgcgccgtattcttttgatgcggcacatgcgcgccgccgtgcgtgcggtacgggcgcttcggaaaggttatttccatcttccttcgtccttcctttctaaaaaacagactttgccggccggaaccggcaaagccgaacggcgcacccgccgcgccggccttctgccggcgcgtttttcacgggaatgcgctgccccgcgcggggtactttcgccgccgcggcagggacttttcatcattttatcacggtgccccccgcttggcaagagtatatgcaccaaatgcgcgccgaaaagcgaaatattcgggcgaaatactacgaaaagaaacggcgcggggaaatatagccgctctcgtattcctcgcgcaggagcgagtaattcacgcagtcgagcaaggcgccgtcgaagcgcctgaacccgcagaccgagtagccgtcgaacaggaagcccgcgcgctcgatcacgcgcttggagcgctcgttgcccttgaagtgcgcggccacaaggagatcgacatcgtattcttcaaacgcgttgcgcacgacggcgcgcagcgcctcggtcatgtagccgcagccccagtggcactttgccagctcaaacgcgaccgagaggctctccacatagctgcgcgttaagtcatcctgatacttgatctgcccgatgatttcgccggtgctgcgcagcgtgatcgcaaagccccacggggtgttcaccgagcgccgcagcccctcgcgcgcctccgccgccgtgcgcgccggcttcaggccggccggtatcatcacatcggggtccgtcccaaagagaatatacccctgcatgtcctccaccgtccacgagcgcaggtagaggcgctcggttgttatcggcttacagcggtctaaaaaatgtatcacagcactaccccttccggtaaaataaaccgcagcgcaccgggcatcaccgcataggcctcccggcatgtgcgcacgcagtttccatccatattgctgaccatttcggccgggctctcaatctcgatgcgcgtgccccgccggtagacgagcaggtcggaaaagcgcgcgctgtcgatatgctcgccgcgcttgtaacgccccacaaggcccgggatccgatggtacgccggccggcggatcaaaacgaaatcgagcaggccgtccgcaagctccgcccgcggcgcgccgcagaacccgccgccgtaccagcgcccgtttcccgcgagcgcaaacatgaattcgccgctgtaccgctccgtttcgccgcgctcgttcgtgatcgtcacggccatcgggtcggcgagcctgccgaaaaagcacttcgcaagcgagagcgtgtaggccagctcgccgctcaccgccggcaggtgcttgtagcgcgtcatctcctcggcgaccttcgcgtcgaagccgagcgagcagatgttgaccgcgttgccgtgctcggtgcggatcatgtcgatcggcaccgccgtgccgcgctgctggcgctcgaaattcataaagatgtcccgctcaccgagcgtgcgcacgaaatcgttgccgctgccgcacgggtacacgccgaccgccgcgttctcccggtttgccgcgccgcgcacgacctcgagcagcgtgccgtcgccgcccacggcccagatacgcaccgcatcgccctgcgccgcggcctcgcgcgctagcgcctcgccgtggccggcgcgctgtgtcagacagagcgtgtacgccccgccgtgcgccgcgtgaaacgctttcacgcgctccataaaaaacacggccgaatttttctttcccgccttcgggttgatgatataaacgtcccgcaaatggttccccctctttcccggcggcactttccgctaaagccgcctgtgccccgcaggctcagcctgccttgtagtacatgtaatactggcagcggatcatgccgttgtagagcttgcgccggcggtccgccctgcggccgaacagcgtttcaaagcgctcgtccgggctgatgaccgcgtagctccagccgcgcttcggcctgaacacgcgccccatcgtcctgtagatttcctccgccgcgcgcacgtcgagcagccgctcgccgtagggcgggttgcagatcacgcagccgtactcgccgctgccgtcgaaatccgcgatgccgcgcaccgcggcggtcacggcatccgcgacgcccgcctttttcgcattttcgagcgtcaggcgcacggcctcggggtcgatgtcgtacccaaaggctcgaaagccctctccccggcgctcaagcgccttggccgcgcggcgctccgcctcccagacggggccgggcaccgtgcgccacctttcggccgcgaagtgccggcgcaggccgggcgcgatgcgcatcgcgagcatcgccgcctcgatcacgaccgtgcccgagccgcagaacgggtcgatcagcgtgccgtccgcgcgcacgcgcgcgagctttgccatcacggcggccagcgtctccttgatcggcgcctcgttcgaattcttcctgtagccgcgcttgtgcaggcccgtgccgctcgtgtcgagcatcacgctgacctgatccttcatgatcaaaaactggatctggcagagcgggcccgtctccggaaaccgctcgagccggtacgtccctttgaggctctcgacgaccgcctttttgataatcgcctgacagtccggcacgctcatcagcgcgctcgagaggcaccgccccttgacggggaacgcgtcgtcgcggccgatccactcggcccacggcagcgcctttacgccgttgaaaagcgcctcgaagctcttcgcttcaaatgtgccgagcaaaacgagcacgcgctcggcaaagcgcgcgcggatattcgcgcgggcgatcatttccggcgagccctcgaacacgacgcgcccgttttcgggcgtcacctgcgcggcgcccatctcccgcagctcgtccgccacaagcccctccacgcccagaaggcaggggcacaccaatcgatatgctttcacttgctttcgtttcctcacaatcctgaattcttacaaaaagtatagcatagttgcaccgcggccacaaccgaaaaagcaaaaaagtatccggacgccgatcgtttgcatccggatactcaaaatcacgtggacaatctatgtacttttaataaaacgttgcgacgggctgtgcgggcgcttcggcgggctgcatttcgagcagcgtcagcaccgggcccttctggccgtagagcttgtgccatttgtgctcgattttcgcgcgcatcgtgtaccatttcccgttttccggcatcgcgtccgccgcgcactgggtcaaaaggccggcgaactggatgtcctcgacgcagcacgtcatgagctggcggccgaaaaagaacgtgcccggcttcatgcgcgggttcaccgcggcaaggcccttgtattcgaccgttttgccgtcgtacttcttcgtctcctcggagaggtcgcggtaccacagcgcgtagtcgtcgtcgccgatctcgatgaccggcgcgtctatgtcgaacggcagcgggtcctcaatctcgtcgtattcgacgtcgccgctgacgtactcgtacgcgatgtccggccggcgggaaacgccgcggacgatcttgtggaacgccatcttgtccatatcccgcgtgaagcggttgaacacgacgagctcgcagcccgtcagcttatcgacgacgaggccgcgcatgttcgcgttgtaggcgaggaacgtcgcggcgtcggcaaacataaattcctgatagacgatccagcttgcgggcagattgtcgtagaggtttttgagctgccacatgccgttgtactcgatcagcacgcgcgccgctttgtgctttttcacgagaagctgcagggcctcggcgttcagtgccgcctcttcctcgatcgtctcgataaaaacgcttttcatgtacggctcgtccgcgtcgtactccgtttcgcccgcctcgcagagcagcagaagcgtgcgctgcccgctgtgaaagcgcttgtccgcgagcgtttccttgataaagctcgtcttgcctgcttccaaaaacccggtaaacaggtaaaccggcatctcctgcatggggaaaacctgcctttccttaggcgaagagcgccttgagcgcttcctcgttgatctgcgcgccgatcacgcacaggcggccgatgacgatcgcgctgccctcgcggacgcttgcctcctcgggcacgaaatcgaagtggagccacccgccgtcctgcccggcgacgatgccctttgcgcggaggatcacgccgtatttctcgctgtccgacagcgcggcgagcgcgttttcgatctcctcctttgtgaaccggcgggccgtctccacgccccagctcgtaaacacctcgtcggcatggtggtgatggtgatcgtggccgcaggcgcattcaccgtcatggtcgtggtggtgctcgtgaccgcagctgcattccccgtcgtgatcgtggtggtggtcgtggccgcagccgcactccccgtcgtggtcgtggtggtggtcgtggccgcattccccgtcgtgatcgtggtggtgatcgtggccgcagctgcattcctcgtcatggtcgtggtgatcgtggccgcagctgcattccccgtcgtgactgtggtggtcgtgatggtgatggtgctcgtgcgcctccgcctcaagccgcttcagctcgtcgtccagcgtgtccttgtgctccatcgcctcgaggatctgcgcgccggagagcgcgtcccacggcgccgcgatgatcgtcgccgccgcattgtgcgcgcgcagcagttcgacgcactcgtcgagctttttctgcgcgatgcccgccgtgcggctcaggataatcgaattcgcgtgctcgatctggtcgttgtagaactcgccgaaattcttcatatacattttgcacttgttcgcgtcggcgaccgtcgtgaagctgttcagcacgacgtcctccatgtgcaggttctgcacggcgcggatcacatcgctcagcttgccgacgccggagggctcgatcagaatgcggtccgggtggaactgcgcgagcactttttgcagcgcctcgccgaaatcaccgacaaggctgcagcagatgcagccggaattcatctcggtgatctcgatgccggcgtcctgcaaaaagccgccgtcgatcgcgatctcgccgaactcgttctcgatcaggacgagcttttcgccctgaaacgcctctgcaatcagctttttaatcagcgtcgtcttgccggcgccgagaaagccggaaaaaatatcgatcttcgtcatatctgcaaacgtcctttctatcaatcctgcgttttctttgcccagttttttattgtacggctttccgcggcgggatgcaagggcttggcggcaagaattcaaagaaagttttctttttcgcccgcagccctgccgccgcggcgcaaaaggcgggcccgcggggccaaggccgcttagaaacgcagaaaaggccgggcgctccgccgcccggcccgcaaatccggcggtgcgttttccacgccgccgcggtatcttgttgaaagcgcgccgctaccgctcgttcttccaaaaggatgcgctgctgtcgcccgcgccggctgtcgcgagcagaatctccttctcatcgccgtaccccgcgctttccatctgctttttgagccacgcgcggtccttaccggccttttggagcgcgtcgtccatcacgcgcccgtcgagaatcacgtcgtacagaatctcggcgggctgcaccgcgatgccgctgtcgcccggcgtcgccggccgcttatcggcaaacggcagaaagctgacgtttccgttgtgctcgaaaacggcgccgctgacctcggaaaggtcgaaatacccggaaaggcgcgccatcgcgagaaactcggagaggtcgaggtgcgccgccttgaggccggcgcggtacagctttccgtttcgcatcaggacgatcgggcggccggcgagaaacgccctggcgcgcagcgatttgttccccgccgccgaaatagccaccgcgacgagcgcgtaaaccgccatggccagcgcgcagccccacgggtccttgtcgatgtcggtcgccatctccgccgcgatcgagccgatcgtgatgccgacgatatagtcgaacagattgagctgggcgatctgcttgttgcccatgagctttgtcagaaaaaacaggatgacgatggaaatgaccgtcatcagcgtaaccttcagcacagcgcttcccccttttcccgtttattctgccccggtgccgcaaaagtatgaacgcgccggcgaaatcagagcccgcacaatcggcttctttttcgatgaggcgctgccggaaagcggcgagctcctgctctccgtcagcgcagggccgggatatattcagattcccgccatgggtctgacgcagcgcctcgttcggccgagatcgacgaaagcattttgcagcagctcaagacaaccgtaaaaagagcggacgtcgccgggcgtccgctctttgctgtttatctcgtatatatgccccgctcagtcggcctgtttcagatcaaaatcctcgggcagcagcgtttccagcgtctgctgcgtcagggcggaaatgtcgccggccgtgaggcggcgggactggctgaggatcgcgtcctccacgaggttgcgcgccatgcgcccgttgccggccgtgcgcgcgtccgcggcctgccgcgcggcaaagtacgccgtgagcggcgcgtcgcaggcggcgtcgagcgcatagcccttgttctccaccgtgatgcgcgcgatgcgcagcagctcctccgccgtgtagtccgggaactcgatgatgttcggaaagcgcgatttcaggccggaattcgacgtgagaaattcctccatctccttcgagtagcctgcgagaatcacgatcaggttctggcggttgtcctccatgcccttgacgatcgtgtcgatcgcctcgaggccgaagctgtcgtcggcgccgcggcagagcgcgtacgcctcgtcgatgaacagtacgccgccgaccgccgagcggatcacctgctgcgtgagcggcgcggtgtgcccgacgtacttgccgacgaggtcggcgcgcgtgacctcgacgagttgcccgcccgtcagcacgcccatcgcctttaagtagcgcgatacgagccgcgcgatcgtcgttttgccggtgccggggttgcctgtgaagatcatgtgcatcgcgggcacttcggccttcatgccgcggctctcgcgcagccgctggatcacgtaattctgctcgagcgagagcacgtaatccttgacctcccgcagaccgacgatgcggtccatctccgctttgacggcctcgaccgccgcctgattcacggcctgcgtttccgcgcccgccgtgacggtgaattccggaaaaacaaacgcaagcccgccgtcctgcgcgcgtgcggcgcccgaaagcgcccccgcgccgcggcgcagcttttcctcgctcagaaaccggaagcagcgctccgtgatgcggccgatgctctcgacgccgtccttgcggctgaactgcgccgcgaggtaatcggccgcgtcgtcgccgaacgaaaccgtgaattgcagccgctccttggcgcgcgcggcgagcgcctccatcgcgaggcggccgatctgccgcaggctctccggcgtgaaatcctcggtgcggcagaaatccgtgaccgccgagaggaacggcgcgccgaacgcatcggcaaacgccgcctcgccgcggtcggtgataaagacgaagaactgcccgccggcgcggatctcgctgacggcgttcggcacgagcgcggtgcccacgtcgatcagcatgcccttttgcagggcgtagcgcgtcgagagcttcagcgtgcccgtctcgcagagcgcagcgagcatcggcagaagcgacttgtggcagcgctcgaagttttcaaacagcagcacgtcgtcgcccgactgtaaggccgaaaaaaggtcctgcatcaagaggcggccgtcctccgcgttcgggtagagcgcgaggtctatccgcgagatcttcccgtttttcagcgcgccgccctgcgcgagcgacgacgcggcgacggaaagcgcgctgtgccgccccgtgccctcgcggcccgagatcacgacgaccgcggcgggcttgccctccggcgtgccggtgacgcccgggcgcttgaacgcggtgaaaaggctgttcagaaaggcgtcctgcccgatgaccgcgccgcccgccgcctcgcgcgcctcgcggaacagcgccgcggtatcccgcggcggctcctcggccgtgcccttcgccgtgggccgcgcctcggctttccgcgcctccgccggcttttccggcgcggattccggccctgcggccgcgccgtcgctttcgagcaggcggcgcatttcggccatgctccgctgcgcctcgtcgttgatgcgctcgaggtcgctgatctgccggtcaagcccgcggctcccgtttttgtccgccgcctccatctgcttcaaaaattcctcggcctcctgcgccgcgcggctgcgggtgctgccgcccacgtggagccgcccgccggaaaacagcgaattcaaaaggctgtcaatgtcgtttttcatgcgttacccctcgatggcgcggacgaccgcgccgaccagcgcgctgtccgtcaccttatattcgtcctccggcacgcctctgccgtcgattttgccgccgaaaaagatctccggattgccgcacacgctcgtatcgcgccgcagcgaacgcgccgaggcgtgcacgcttttcacgccggtctccgcaatgaagccgcgcacgttcccggcattgacgccgccgccgggcagaatgtcgatgcggcccgccgcgtgggcgagcattttccggatcgtttcggcgccctgcggcgcgctcgcgcgctggccgctcgtgagcacgcgcgtcacgccgagcgcggtcaatgtgtcgagcgccgcaaagacgtccggcacgacgtcgatcgcgcggtggaaaaccgtctcgacttccgggttttccgcgcggacgcggccgagaaagtcggcgcagcgcgctgcatccaccgtgccgtcatcgttcagaaagccgaacacgacgccgtccgccccggcgcggaccagcgcgagcgcgtcgcggcagaccgtgtcgtagtcgaaggccgtgtagcagaagccgccctcacgcgggcgcaccatgcacatgacggggattttcacctgcgccttcacggcctcgagcgcgccgatgctcggcgtgagcccgccgagaaacagcgcggaattcagctcgatgcggtccgcgccgcccctttccgcctgcacggcgtcctccgtgcagccgcagcacacctcaaataaaattttctctttcatgctccgttttcctttcctgcctgtaaattatgtttttcagcgcggcgcgccggaaacacgcgccgcccgccgcaaagaattcgcgttttgtctattttgcgtctttactttcgcctaaaaaagattataatatcctttggctttaaaataaagcaaaaatctgtaaatatgaaaagaatggtgatttttcatgctggatacggctcttttgacagaagaataccgcggcggccttttggacctgacgcattacggctacatcagcgttgtcgatgaaaacggcaaggttgtgtacgcggcgggcgacccggaggcggtcgtttactaccgctccgcctcgaagcccgtgcaggcgctgccggtcatcgcgcaccggctcgacgagaaatacggcttcaccgacgaggagaccgtgctcttctccggctcgcacctcggcgaagccttccacatcgacgcgcttaaatcgatcatgcgaaaggccgggctcgacccggaggacctcatcgtgaagccgaccgtgcccggctcggtgcaggcgaacgaggaccgcatccgcgcgggcctgccgaaatcgaagctctaccacaactgcagcggcaagcacgcggcgctgatgctgatccagcgcgagatgggcggcgacgtgaaggattactggaaggtcggctccaagggtcagaacgaggtgctgcgcacgatgagcgcgctctccgaatacccggaggacaaggtcgtcatcggcatcgacggctgcggcgtgccggttttcgcctacccgatgaagaacatcgcgatcgcttacaaaaacctcgcgtgcatcgacacgatccgcgacgacacgctgcgcgagaccgcgcgccgctacgtgccccgcatccacgagtacccgcacatgatgcgcggcaccggttacctctgctcgcttatcaaccacgacgcgaacatcgtcgcgaagggcggcgcaaacggcgtctacggcatcggcctcaagaaggagcgcctgggcatctccttcaagctcaaggacggcaccgaggcggtgtggccgctgatcatccgcgaaatcttccgccagatcggctacttcgacgccgagaccgacgcgatgctgcgcagcctcaacagcggcgtcaccgtgaacgacaatgacacgccggtcggcgaggtcaaggccgtctttaagctcgaaaaattcgcataaagctgtagctgcgcagaagcgccgcgtttatgccgcgtttatttataagcgcggcgtttttgtcccggctttcgccgcggtcacagcatggaagccagagtctccgcatcgatctgccccggtgcggaggcttttcctttgctcgcaaacgtcacggcagagccgaacgccccgccgcgcacgcgcgtcattttgccgagctcgcccatcgagatgccaacgagcggggcgtgcgcggcgctcgcctccgtcatggcggagagcagcaccatcacgtcgcgctggcactgcggcatcacggcgattttcggcaggtcgccgccgagcgccgccatctgcgcatagcgctccacaagcacggcgcgcggcggggtcttttcaaaatcgtggctcgagagcacgagcaccgcgccctcggcgtgcagcgcatcgatcgccttccgagcgcgcgcttcgtgcgcgaggcacagcgcgagctcgaggtcgagcatcggcacgccgagcgcgccgagcgcctcgttcagcgcgaaataatcctcgggttcgatcgcccgctcgccgccctccgatttcgtgcggaacgtgcagagcaccggcagcgcgccggctgcctccagcacggcgggcgctgccgcgagaatgtcctccgcaaaataatcgagccgccactcgatgaggtcggccggcgtccgccggatctcccgcaccgcatcgagcgccgccgcgcgcgttttttcgcacaccggcacacagatcttcatcttcccggcgccgaacacaagccccttcacttccacatgccgcataccacaccaatcctttttgtcagattttcttcccattcagtatagacaattttgtgataaaagtcaaagccgcgtgcaaaaaatatgcagaaatccgaaaatcaggatttcaagcggtaaggcgctttttttccgaaacagaccttgactttcccgcacaggcttcgtatactagaggcgctttttatttcaagggcggatgcccgggcggcgcggttagcgcggcgccgcttccgcggaggagtttacttaccatgaaacagatttgtttaaaagactggcagctcgcttactgcgacatcggcgcatggcagcccgaggacgctgccgcgcagcccacaatcccctgcgctgttcccggcgcggtccatctcgcgctgctgcaggccggcgtcatcgacgaaccgcttgaaaagctgaacatggagcgctgccgcttcgtcgaggacaaggacttctggcacacggttacgttcaagcccggcccggatttccgcggcgagcgcgtcctgctgacctttgagggcgtcgacgtaaacgccgactactacctgaacggccgccgcctcggccacagcgaaaacgccttttaccccgccgaattcgacgtgaccggcctgctgctcgacggcgaaaacacgctcacggtgcgcgtcaacgagggcgtcgcggctgagcgcgccaagggcaagccgctcgactttatggagctttcctggaacagggacgagccctaccgcggctacctgcgcaagccgcagttctgctacggctgggactgggcgcgccggctgacgacctgcggcatctacaagccggtgtacctgcgcagctacgataaggcgcgttttgcggacgtgtacgtccacagccgcgtggcggacggcacggccgaagtggaggtagactgcccggtggagttcttcggcgacgcggcctgcaccgtgcgctgcaccgtgacgaccgacgccgccttcgaggcggagagaaccgtcgccgccgtgaccgcgccggccgaggacggaaagctcgccttcacgatcgaaaacccgcagctctggtggtgcagcggctacggcagcccctacctctacaccgtaaagctcgagctgctcgacgcgtccggcgccgtgctcgacacggcggtcaagcgccacggcgtccgcacgcttaccctgcgccaggcgccgatcggcggccggggcgacaagaccttcaccttcgtgctgaacggcacgcccgtctttgcaaagggcgccaactgggtgccggtggaccagatcatcggccgcatcacggcagagcgctacgagttcctgatccgctgcgcgctcgacatgaacatgaacatgttccgcgtctggggcggcggcttctacgagagcgacaccttcatggacctgtgcgaccgcctcggcatgctcgtctggcacgacttcatgttcgcctgcagctattacccggacttcgacgcggagttcgtggagaacgtccgccgcgaggctgtgtatcaggtcaagaacaagcgcggtcacgcctgcttcatcggctggagcggcaacaacgaaaactactcgatgtacgagggccacatcaagaacgcggaaaagccgtttccgttctacggcaaaaagatttacgaggaagtgctggcccccatctgcgcggcctacgacccggagcgcccgttccgcctgagcagcccgtggggcggcgactgcgccgacgacatccgcgagggcgaccagcatttctggggcacctaccacgacttccacgagctctacggcgatttcttccgcatcgcggaatccaaggcctccttcgtcagcgaattcggcatgatcgcgccgctgaacctcgagtcgctcaaaaagtgctgcgacgcggatcagctctacccgcagtccgagcagtggcgcttccactcgaacaccggcgacaactttgaaaagatcctctcccagtacttcggcgcggcggagccctgcaaaacgatcccgctcgagcagtacatcctgatggggcaggccatacaggccgaagtcatccgttcggcgttcgacaagtaccgcagcgagaagttcctctgctccggcgcgctgttctggatgtacgccgactgctaccccacctcgggctggtgcttcgtcgattactacggcaacaaaaagccgctttactactacacgaagcgcgcgttcgccccggtcggcatcttcttcagcgggtacaacccgaacgccctgcagggcatgcgggaataccgggcgcattacgcgcagaacggcgccgcgctgcgcatcgcgctgacgagcgacctcacgcgcagcgtttcgctggactgcacggtccgcgtgatgacgctcgcgggcaagacgctcctgtctgagacgtttgcggccgaccttccggaaaattccgcaaagccggacgcctacacgatcgacgtgaccccgtgcctcgcggactgcgacccctgcgacctcgtcgttctgtgcaccgcgtcgctggacggggagatcgcggcggaaaaccgctgcttcctcgcgccgtttaaggacctgcacctcgaaaaaacaccggtgcgctgcgaggctgcgccgtgcggcggcgccgtgacgctgacgctcaccgccgaccgctacgtgtggctttgccatctgccgcacgacgagggcgttttcttcgacaacaacgatttcgacctcgtgcccggcacgcccgtccgcgtgacggtttccggcccggcggcaaaggactacaagttccgctgcctgacgatgaacgactgcttgccaaacggctgagcgcggcgttataatggaagcatcggaaaacgaaaggaaggttgtatatgctgaaaagtcaggaaatccgcagaatcgcgccggaaatggacccgctgcgcatgggcatgggctggaaggccgaggacctcggaaagccgcagatcctcatcgaaagcacctacgggcagagccacccgggctcggcgcaccttttaagcctcgcacagaaggcgcaggccggcgcggacggcgcaggcggcaaggccgcgctctattttgcgaccgacatctgcgacggcatggcgcaggggcacgacggcatcaactactcgctgccctcgcgcgacatcatcgccgacctcgtggagatccacgcgaacgcgacgacgtttgacggcggtgttttcctcgcgagctgcgataaatcggtgcccgcgcttttgatggcgattgggcgcatcaacatccccgccgtatttgtgacgggcggcgtcatggacgcgggccccgatctcctgacgctcgagcagatcggcaaatacagcgcgatgttccagcgcggcgagatcaccgaagagcagttcacctattacaagcacaacgcctgcccctcctgcggcgcgtgctcgttcatgggcacggcctcgacgatgcagatcatggcggagtcgcttggcctgatgctgcccggctccgcgctgatgccggcgacctgcgccgacctcggcgacgtggcgctggcggcgggcaaagccgccgtggcgctcgccgaaaagggcgtgcgcgcggccgacatcgtgacgcgcaggtcgtttgaaaacgcggtcatggtgcacgcggcgatctccggctcgaccaacacgctgatgcacctgcccgccattgcgcgcgaattcggcgtggcgctcgacgccgacgacttcgaccgcctgcaccgcggcgcgcactaccttttgaacatccgccccgccggcgaatggcccgcccagtatttttactatgcgggcggcgtgccgcgcgtgatggaggagatccgcagcatgctccacctcgacgcgctgaccgtgaccggcaaaacgctcggcgaaaacctcgacgagctgaagcggaacggtttctacgagaagtgcggcgcgtatctgcaaaaaaccggcctcaagcgcaccgacgtgatccgcagctttaacgacccgatcggcacgaacggcgcgatcgcgatcctgcgcggcaacatcgccccggacggcgcggtcgtcaagcacaccgccgtgccgaaggaaatgcacaaggcgctgctgcgcgcccgcccgttcaattccgaggaggcggcgatcgacgcgatcctcacccgaaagatcaacccgggcgacgcggtgatcatccgctacgaggggccgcgcggcagcggcatgcccgagatgttctacacgaccgaggcgatttcaagcgacccggacctcgccgcgagcatcgcgcttctgacagacggccgcttctccggcgcgagccgcggcccggccatcggccacatctcgcccgaggccgccgagggcgggccgatcgcgctcgtcgaggaaggcgatctgatcgagatcgacatcgaaaagcgcgtcctccgcgtgtgcggcatccacggcacgccgatggacgaggccgagatcgagcgcgttttcgccgagcggcgcaaagtgctgccgccgtttaaaagccgctacacgcgcggcgttttgaagcgcttcacgcagaccgcacagtcgccgatgaagggcggctacatggaataaacgaaagcgcccgtgcaggatcctgtttctctgcctgcacgggcgctttttgtgtgttttgacaaatcccccatgtatatacgaataattatacatttatttgtccgatccatcaattgaactccaccggaaaacaaggtaaaatacaggtattctataaagccggcgggaatctgccggcgggggaaaatgaggaaggatgaataaaaatgaatactaagaagattttcgccgtgcttttatccggcatgctcgcgctgtctgtgacagcttgcggcggtgattccgccaaaacgatcgaaagcccggacgatttcgagggcgcgaagatctcggtgcagaccgcgaccaccgcgcacgagaacattcaggatatgctcgacgcgggcaaaaacatcgaggtgctgccctacgaaaaggtgacgcagtgcttcgacgacctcgagctcggccgctgcgacgccgtgtacgtggacagcgtcgtcgccggctactacctgaccggcagcgaccagttccagaaggtatggacgagcgaggacggcgagccgatcggcatcgccctcaagaagggcaacaccgatttgaaggcgattctggaaagcgctatcgacacgctgtactataacggcacgatggccgcgctttccgagaagcatttcggctcggcggacgacgtggacggcgtgcgcaccgtcacagaagagccggtgctcgacctctcgaagctctcgaccatcgcggacggcacgctgaccgtcggcgtggagatcggctacccgccgatggagtacatggacgagagcggcctcaacccgatgggcttcgacgtagacctcgcaaacgagctcggcgcgctgctcggccttgacgtggagctcgtcaacaccgcgtgggacggcatcttcgccggcctcgacaagggccagtacgacgtcgtgatctcctcggtttcgatcacgccggagcgcgcggcggcctacgagctgaccgagccgtacgtctcgaaccagctcgtcatcgtcacaaagaaataagcgcgcggaaaatccggcggaccgccggcggagaggcgcttcccccctctcctttttcgcccccgggcggcatgcggcgcgcggattcggcaggatgctcggaaatagctatgtatatatgtataaatatgcacgaatttgtcagattcatcaattgaccccaaaacggtttcagggtaaaatgtaaatgcttgtgaacaacagaggaaggaaggattgtagaacaatgaaagcaaagaagattttcgccgctgtgctggcgggcgcgctcgcgctttccgtgacggcctgcggcggcggggaaaccaagaaagtagaaagcccggcggatttcgagggcgcaaaggtttcggtgcagaccgcgaccaccgcgcacgacagcctgcaggagatgcaggccgagggcgtgaacgtggagattctcccctatgagaaggtgacgcagtgcttcgacgacctcgagctcggccgctgcgacgccgtgtatgtggacagcgtcgtcgccgcctactacctcaccggcgaggaggataagttccagagcgtgtggaagagcgaggagggcgagccgatgggcatctgcctcaaaaagggcaataccggcatgctcgagctcgtggaatccgccatcgacacgctgtactacaacggcaagatgggcgagatcgcgacgaagcacttcggctcgaatgtgacggagggcgtgcgcaccgtcaccgaggagccggcgatggacctctcgaagctctcgaccgtcgaggacggcaagctgatcatcggctttgaggccggctatcccccgatggagtacaccgacgactccggcctcgagtacatcggcttcgatgtggacctcgcgaaagagctcgcctctatgttcggccttgaggtcgagttcgtcaacaccacgttcgacggcgtgtttgccggcctcgacaagggccagtacgatatgatcatcgcggcggtctccatcacgccggagcgtcaggcggcctacgagatgaccgagccgtacgtttcgaaccagctcgtcatcgtcacaaagaaataagcctttcaaaaacgcattcagagactctgcgcgcagggtctctgccttgatatggaggaaatgaatacgccatgatggatgcaatccaacagattattggctggatgcccgccctgatccagtccaccggcacgacgctcgcgctctctgtgctctccgttgccgccgcgctcgttttcagcgtctttctcgcgctgggcaagatctcccgcaatgcggtaatcagcggggtctgccgcgcctacatcttctttttccgcggcacgccgcttctgatgcagctctttttcatctactacacgctgccgcagctcgtgcccgcgctcaacatccagagccgcttcttcgcggcttggctcgcgttcacgctgaacgtcgcggcctatctcgccgagatcatccgcgccgcgatcgaatcgatcgacaagggccagatggaggcctcccgcgcgctcgggctcacccgcagccaagcgatgcgcctcgtcatcatcccgcagtcgtaccgccgcatgatcccgccaatctgcaacgagttcgtcatggtgctgaaagacacctcgctcgtctcaatcatcgcgctgacggacctgacctaccagaccaagatcatcgcttcgaacaaggcgagcgcgctcgtctacatcccggccatgattatttacctgattatcacgggcgctttcaccttcattttcaaccgcctcgaaaagcgcctttcgatctacgaataagggggatttgacatgtcgatcatcaaaacggaaaacatctgcaaatccttcggcacggttgaggttttaaaaaacgtcagcctcacggtggagccgggcgaggtcatcgtcatcatcggcccgtccggcgcgggcaagtcgacgtatctgcgctcgctgaaccgcctcgaaaaaagcacgagcggcaagatctggatcgatgaccggctgattgaggaccgcgtaaacgggcacaatcagatcaagattcaccaaaaggagcgcgccgccattctgctcgagatgggcatggtgttccagcgcttcaacctcttcccgcacaaaacggccctgcagaacgtgatgctcgcgccgatgaccgtgaaaggcgtgccagccgacaaggcccgcgaaaaggccgtgcagcttttagagcaggtcggcctcggcgataagctcgacgcctaccccgcgaagctctccggcggtcagcagcagcgcgtcgcgatcgcccgcgcgctcgcgatggagccgaaaatcatgctctttgatgagccgaccagcgcgctcgaccccgagctcgtcggcgacgtgctcgccgtcatgaaaaagctcgcggaggacggcatgacaatgctcgtcgtcacgcacgagatgggctttgcccgcgaggtcgccgaccgtgtcgtctttatgtacgacggcgcgattttggaggagggccccccgcaggagatctttacggcgccgaagcacgagcgcacgcgccagttcctgcaaagcgtgctgtgagggccgccatggcagcgaacccttcaaaatgcgaggactgcctgtattacgagtacgacccggaatacggcttttatgtgtgcgacatggagctcgatgaggacgagaccgcgcggttcatccgcggcgccttttcggactgcccgtactaccgccccggcgatgaatacacgatcgtccgcaagcagatgtgaacaaagcgcttccttaacagggagcagcactctttcagccaagagcagcctcttttattcaaaagcagagcttctccgttgaaagagtgctttgtttttccttcgcgcaatttacggcttgaaagcctactaataatatggtattataggtaaaacacctgcgcaaaggacggaacaaacatgaagatctctaccaaggggcgctatgcgctgcgcatgctgctcgacctcgcacaaaatcagggcgagggcttcgtcgccctcaaggacatcgccgcgcggcagaatgtctccaaaaaatacctcgagcagatcgtgcccatgctgaataaatcggacatcctgatcgcgagccgcggctttcagggcggctaccggctggcgcagacgccggataaatatacggtcggcgcggttctgcgcatcacggagggcagcctcgcgccggtcgcctgcctcgaccacgaccccatcctgtgcggccgcagcggcgactgcatcacgctgccggtctggcaggggctaaaccgcgtcatcaacgaatatctcgacggcatcaccctgcaagatattcttgacagccgcgcgggtactttgtaagcggcagcgggcatgaaccggtgtgtgaaaaagggcggagctgcgcggctccgccctttctgcataccccgcccgaaaacacgggcgaatccgccggctccgccgcggccacacggacggcggggttctgcgccttgaggtattcgccgacgccggccgccgtgccggcgcctgccacaaaaagatcgccccgccatccgtatccatcggatctccggccccgtggtactgcggtgcgcggccggactcgccgcattcgtaaaccgccccggcataaagctaatgccgcagggaaataattcgaaaacaacattgaaatacaacttgacgggcgctaaaaaggcaaaagacagtgcagaaagcggaaatgctttatacgctgtcctttttattaaatttcaaaaacacattgacaattctctatgtgacgcatataataacacatagacaattatccatgggggtgattttgagagatggacgaaagaagaactgcggcaatcttcaaagcattttgcgatgaaaaccgcattagaattataaagctgctgcgttcgggcgaaaagtgtgcctgcaggctgttggaagaaatcaatgtcacgcagcctacgctttctcaccatatgaaaattctttgcgacgctgaaattgttgccggccgcaaagagggaaaatggacgcactattctatttcagaaaaaggcgtgaagcaggcaaaggaatgcttggagcagttgacaacacttgatattgaacgcagaaacgagtcgtgctgtgaaaagtgagaagatttacagattacttttccgcacggcttatatttggaaatatacatagacatatttcaatgtaactatatgaaaggggtttcgtatggaagcactaaaaattggctgggacttttttcaaaatgaagtcctcggtatgaactggttgaatcggctcattactattattttgaacgcctgcggtttagacaccacaagtaaaatcgtcgccagtgttcagtttttcttttacgatacgattaaaattatgattttgctcggcgtgctgattctaattatctcgtatattcaaagctatttcccgcctgaaagaacaaaaaagatacttggcaggtttcacgggatatgggcgaatatcatcgccgcattacttggtacggtaacgccgttctgttcgtgttcctctattccgctgtttatcggatttacaagcgcaggtctgccgcttggcgttacattttcctttttgatttcttcgccaatggttgacctcggaagtcttgtgcttctgatgagtattttcggttggaaagttgccgttttgtatgttgttctcggcttggtaatcgctgttgcaggcggtacgctgattgaaaagctccgccttgaaaatcaagtggaggaatatatccgaaacggtcacgctattgatattccgcaggaagaactgcatttcaaaggccgtatgaaatacgcttggaaacaggtcgtttcaacagctaaaagggttgcgccttatgtgctaatcggtgtcggtatcggtgcaattatccacaactggatacctgaagatttcattgtcaaggtgctaggggataacaatccgtttggcgttgtgcttgccgctgtcgcaggtgttccgatgtatgcggatattttcggcacaatcccgattgcggaagccctacttgcaaagggcgctttgctcggcgttgtcctttcctttatgatgggcgtgactaccctttctctcccgtcaatgattatgcttcgtaaggcggttaaaccgaaactattaggcattttcgttgcgatatgtacaatcggtattatcgttgcaggctatttcttcaacgcaatacaatacttcattgtttaattttaggaggttatcattatggcattgtttaatttcggaaagaaaaaagaagaagaaaagaaaacgcctgcttgcgcttgcagcagcggatgcccgacaagtgagtcagaagaaatcgcaaatgactgctgccctgaagcaaaggacggaatttgttgcattaaggtattgggcgcaggctgtaaatcctgccgcgaacagtatgaaaacgcacaaaaggcaataaaggatatggggctttccatagaggtggaatacattacggatatgcaaaaagtaatggaatacggtgttatgagtatgccagcccttgttgtcaatgaaaaggttgtttctatgggaaaagtgttaaaaacgaatgaagtcgtgactttattacataaattagaacatcagaaatgaaaaatatcgcaaaattccgcataccgtaataagcagggaaacggtattgacagtttccaaaagcaagaaaacggtgtaacccattttattgagttacaccgtaccctacataaaaactcccttacctgtcgttgccaaaagccgccgggcgtttcagccgcaagtgcctccgctttatccgtgtgcccgcctcagcagatataaaaatttgcattttgggcttgacaagccgcgcttttgcgcgtatgatctaaagcatactaaaccaatgtattttatggttaattttcaggcagggaggcacagccgcatgggcaggctctttttcaatatgctccggcacaatttcagaaacgggcgaatgcgcgcgggcgccgcatttcgcgggccatccgccgcaaacccaaaattgattttctgaaagagggattgaccatgcgctatacatacgacaacttccgatttgaaaccatccagctccacgccggtcaggagcagccggacgccgccaccggcgcgcgcgccgtgccgatctaccagacggcctcctatgtgtttgagaatgccgcgcacgccgccgcgcgcttcagcctttccgaccccggcaacatctacggccgcctgacgaacacgacggtcgagatttttgaaaaacgcatcgcggcgctcgaaggcggcgccgcagcgctcggcgtagcctccggtgcggcggcagtcacctacaccttcctcaacctcgcgcaggcgggtgacaacatcgtctccgccaaaaccatctacggcggcacgtacaacctgctcgcgcacacgctcccgcagtacggcatcaccgccgcctttgtcgatccggacgcggaaaacgcctttgaaaacgccgtcaacgaccggacgcgcgctatctttatcgagacgatcggcaatccgaacgcgacgctgatcgacattgaagccgccgcagccgccgcgcaccggcacggcatcccgctcgtcgtcgattcgacctttgccacaccgtacctgctgcggccgatcgagcacggcgcggacatcgtcgtccattccgcgacgaagttcatcggcggccatggcaccgcggtcggcggcgtgattgtggacggcggccggttcgactgggcgaaaagcgggaaattccccggcctgaccgagccgtgcccgagctaccacggcctccgcttcaccgaggcggccggccccgcggcgtttgtaacgcggatccgcgcggtccttctgcgtgataccggcgcaacgctcgccccgctgcacgccttcctgttcctccaagggctcgagacgctctcgctgcgcgtggagcgccacgtggaaaacacgctgaaaatcgtcgatttcctcgcaaagcacccgaaggtcgagcgcgtcagccaccccgccctgccggagcacccgcaccacgcgctgtacagccggtatttcccgcgcggcggcgcctcgatcttcaccttcgacgtgaagggcggcgcggcagaggcgcaggcgttcatcgaccgcctgcaaatcttctcgctgctcgcgaacgtcgcggatgtgaaatcgctcgtgatccatcccgcctccacaacgcacgcccagctcaccgaggccgagctgctcgagcagggcatccgccccggcacggtccgcctttcggtcggcaccgagcacgcggacgacctgatcgccgatctgcggcaggcgctcgaggcctgattccgcgcgcttttccccggaaacgtcttgacttacgccgcgccttgtgataaaattacagggtaaaatagtatctatgatcggaggatatcgatatggaacgcatcaagactttggagacccgcaatctgtgcgagagcgcgaagaacggcggctgcggcgaatgccagacctcctgccagtccgcctgcaagacgagctgcggcatcgcaaaccagcagtgcgagaacaaggaaacgaagtaatttacagccgacagcacacgttgagaatgccgccttctggcggcatttttcatgtgcgggaacggattttgccatacgaaaggattttcacaatgattcatcgctacaaactcggcgggctcaacatcgtgctggacgtctgctccggctcggtgcacgttgtggacgaggtcgcctacgatatcatcggcatgtacgaggaaagcacgcgcgcggaaatctgcgctgcgatgctcgaaaaatacgccggccgcggcgacgtgaccgaggcggatatcctcgattgctgcggccagatcgggcagctcaaggagagcggcaagctcttcgcgccggataccttcgagccgatcgccggcgcgctcaagcagaagagcgcgaacgtcgtcaaggcgctgtgcctgcacgtagcgcacacctgcaacctcaactgcgcctactgcttcgcgagccagggcaaataccacggcgaccgcgccgtgatgtcgtttgaggtcggccgccaggcgctcgacttcctgatcgagcactcaggcagccgacgcaacctcgaggtcgatttcttcggcggcgagccgctgatgaacttcgacgtcgtcaaggaactcgtcgcctacgcgcgccgccgcgagaaggaggccggcaagaacttccgcttcacattgacgacgaacggcgtgctgatcgacgacgacgtgatcgacttcgcgaaccgcgagatgagcaacgttgttttgagcctcgacggacgaaaggagatccacgaccgctaccgcgtcgattacgcaggcagcggaagctgggagaaaatcgtgccgaaattccagaagctcgtcgcggcgcgcggcgggaaaaactactacatgcgcggcaccttcacgcacgcgaacccggatttcctcaaggatatcgagcagatgctcgacctcggctttacggagctgagcatggagccggtcgtctgcgcgccgggcgaccccgccgggctgaccgaatccgaccttgaaatcgtcaaggatcagtacgagcagcttgcagcgctgatgctcgagcgccgccgcgccggaaagcccttcaccttctaccactacatgatcgacctgaccggcggcccgtgcatctacaagcgcatttcgggctgcggctccggcaccgaatacatggcggtcaccccgtggggcgacctctacccctgccaccagttcgtcggcgaggagaaattcaagctcggcgacgtctggaccggcgtgacgaacacggagacgcaggcggaatttgcggcctgcaacgtctacgcgcacgaggagtgccgcgactgctgggcacgcctgtactgctccggcggctgcgcggcgaacgcctaccacgcgaccggttcggtgcgcggcgtgtatgaatcgggctgcgagctcttcaaaaagcgcatggagtgcgcgatcatgctcgaggcctcgaaggcccttgaaaacgcgtgatggagacgccgatctgcgatttcgtgcgcgattactgcgcgcgggacgcgctgcgcctgcacatgcccggccacaagggccgcgcgctgctcggcatggagccgctcgatatcacggagtttgacggcgcggacgagctgtacgccgccgctggcatcatccggcagagcgaggaaaacgccgcgcgcctcttcggcgcggcgcggacgctgtattccgccgaaggctcctcgctgtgcatccgcgccatgctgtacctcgcgctgctgcacgcccgcgaaaacggcctgcgccccgccgttgccgccgggcgcaatgcgcacaaggtttttctgaccgccgccgcgctcaccggccttgaggtggactggctctatcccgaaagcccggaaagcctgctcgcctgcggcgtggagcccgcggcgctcgaaagctacctcgatacgcgcgaaaggcccgcggcggtctacgtcacaagtccggattacctcggcaacctcgccgacatccgcgcgctttcagcggtctgccgccgccgcggcgtcctgctgctcgtcgacaacgcgcacggcgcgtacctgcactttctgcccgagccgcgccacccgctcgacctcggtgcggacatctgctgcgattcggcgcacaagacgctgcccgccctgaccggcgccgcctacctgcacttttcagaaagcgccccggccgcgctgctcgagcaggccgaaaacgcgctggctgttttcgcttcgaccagcccgtcctacctgattttgcagtcgctcgacgcggtgaaccgcgttctggccggcgattaccgcgcgcggctttccgagacggcgcagcgcacggacgcactcaaggcacggcttaaatcgcacggcttcgcgctgcgcggccacgaacggacgaagctgacactcgcgccgaaatctttcggctatacgggcgacgcgcttgccgcacggctgcgcgaagcggacatcctctttgaatttcacgaccccgactacctcgttgcgatgttcaccccgagcaccgtgcccgaagatttcggccgcctcgagcgcgcgctgtgcgccgtggagcgccgcccgccaatcttgaccgcgccgccgctgccgggccgccccgcgcgcgcctctgcgccgcgcagcgccatgctttcccccatcgagctgctgccggtggaaaactgtctcggccgcgtgctcgcaagcgccaatgtcggctgcccgccggcgatcccgatcgtcgcgtgcggcgagcggatcgataaaaacgcgctgcgctgcttccggtactacggcatcgagacgtgcttcgtcgtgaaggaaccccccgaaaaataaagagcgccgcagagcccgccgccgtttgcacggctggaccctgcggcgctttttataatgctcggctgtaccgcttttcatggatcggcacggcacggatatccgtcttttccacgccgtcgaattgaaacccgttccgctcgtaaaaccggatcgcgcggtcattttcgcgcagcacccagaggtacgctttccgaaacccctgcgcccggagcgcctccgccgcgctggccagcaggcttttcccgatgccgcagcgctggtacgcccgcaggacgtaaataccgcggatctccccgaagcccgccggcgcgtccgcgtcccgcgccgcgccatacccgcagaagccgacgacccgcccgtccgcctcggcggcaaggatctcccggcagctttgctttcggaacatcgccgcgctcttttcggcgctcatgctttgcagatagaccgggtcgatcagcccggtgtacgtctccatccacgcccgatagtgcacggcgccgagcgcctcggcgtcggcgggcacagcctcgcgcacgcgtatatccacagcgctcccccctattttctgcataatttcaaaagcagtcccggcgtttctttcggtgcaccggggctgcttttatcgcttagatcttaattttcagccatttgccctgcttcatgcggatgtagccgagcagaaagcgcgtgaactggtcgccgacgaggcccatccagacgccgagcaggccgaggccgagcgggtagcagagcagccagctcaggcccgggcggatgcaggtgacgctgatcagcgaggccagcgccgtgtatttcgtatcgccggcgccgcgcaggcagccgaagaacacgacctgcgaaatctgcatgtagatgacgaagcacaggatgcgcatgatcaccacgccgatatcgaggatctccgcctcatccgagaacagcgcaaagaggtttcgcccgaaaaacagaaacaccatggacatcacaaacgcgcagagcaggccgagccgctggcacatggaggcgtagagcttcgcgaggtcgcgccgcccctgcccgaggctgcggccgaccagcgcgaccgaggccacggagaggccatcgccgaacgagaatgaaaggctcatcatattcatgccgatctggtgcgccgcatactgcgtcgtgccgagatttgcgacggtgatcgcaaacagcaaaaagccgatgcgcaggaaaatctgctccacaaacgcgctggagccgacgtttaaaagcgagcggatgtcaaaccgggaggaaatccaccccttgatgccgcggatgtagacgaaggactgcttcgaaaacatcgacccgaccgacatgccgcagccgacgacggagccgatgaccgtcgcgatcgccgcgccgcgcgtgccgagcgccggaaaaccgaagttgccgccgatcagcaggtagttgaaaacgatgttgacgaggtttgagacaatgttcgtgcgcatggcaattttcgtattgcccgcgccgcgctgcgccgcattgatgacaagcatgaccgtggtgaacacaatgccgcccatcaaaatctggaaatactcgacggccgcctcgtgcgtatccggcgccgagccggcaaagcggatgatcgggtcggcaaacgcgacgcagacggcgctgacgaccgctgtgagcaccagcgtgacgaggatgcacatgcgcaaaatgcgcacggcgctctcacggttctgctcgccccggcggcgcgcgacgagcgcggagatcgccgtgctcatcgccataaagaccgcgatgccgaggaacttcggctgctgcgtgagaccgaccgccgcgatcgcgtacgagccaagcacgctgaccatgatcgtatcgatgaagccgacaagcgccacgaggaacgactccacgatcgacggccacgcgacgccgaccgtgtcgcgcagaaggcttttgaccggcggtatttcgccggcggccggctcctgccggagaatgcgcgctgtgttgaacaattgcactgaaatccacccaccccaatagttgcttttgaaacaaaacgattatagcacagaaaatgggggcggtcaagcccgtgcggccgaccacccccgtttgaggcgtttattttgtggcgagcagcaccgccgtgttcgatttcgcccagcgcacctgcacctcggcaaacccggccttgaagagcagcgccgcctcgttcgccacggtgagcggcgtaaaggtgtagtagtgcccctcgggctggtgggcctcggcgcgcttgcgctcgaactcgctgcggcagaaatcctgatagttctgcgtgggcgcaaacttatccgtcagaaggaaaaagccgtccttcttgagcccggcgcgcaggttcttgtagagctgcagcttctgcgcctcgctgtaatagtgcagcgccatcgcggcaaccgcgccgtcgtaaaattcaaagccaaaatcgtggtcgaagaaattggcggccacggcctgcacgcggccgctgtaatcggcgaggttctttttgagccgcgcgagcatcttgcccgagcagtccacgcaggtggcgcgcagcgtctcgctctgctctaaaagcggcttgagctgcaggcccgtgcccgcgccgatatcgacgatattgagattctccttcatcggaaaagcggataccatgcgcacgatgtagccgtcctcgtccgtcgtcgcgcggcggacgcgctcgtcgtaagtctcggcgacgctgttgtaatagatatccattttctcgagtgccatgtgcaccagtcctttcaaatcactgccaggaattcccttttcattgtggcgcactttgcgccggtttataccctctattggcgttttcatttttatccatatctctacatctttattttactgaaaaacgcggcgcttgacaacgcaaaaaactaacaattccatacgaaatattgcaggttgatttggggtaaaagcccatgcaaatgcaaaaaacaggcgtttctgtgcgaaacgcctgccaaaagtattttgctttttcagaatcagtcgaccggatgcgggtactttctcatgtaggaaagcagctcgtccaccgttgtgaacgccatgcccgtaacggtgtccgccgcgccgtagtagatcgtgatgcggccggtgtcagcgtcggtgagcgtagcgcaggggaacgtgacgttcggcacgtcgccggtgagctcgtaatcctcctccgggccaaagacgtagaagaggcctctttccttgacaatccacggcttatcgatgtcgagcagcgcgacgccgaagcggtagacgaagccgttgcaggaattcaaaacgccgtggtagatcatcagccagccctcgtcggtctcgatcggggtggggccggggccgaccttcttggactgccagccggcggtcttgctcgtgccgaacacgtagcggtgcttgccccagtaggtcatgtccgggctctcgctgtagaagatatcgccgaacggggtgtggcccgtgtcggacggacggctcagcatcgcgaagttatcgccgatctttctcgggaacagaacgccgttgcggttgtagggcaggtacgcgttctcaagctgatagaaggtcttgaaatcgtaggtgtaacccacgccgatcgtcgggccgtggaagccgttgcaccaagtgatgtagtatctgtcctcgatgaagcagacgcgcgggtcatagcggtactccttgcgcgtgacgcacgggtcgcagccgggcgccggctcaaagacgatcgggtcatggttgatgttccagttgatgccgtcgtcggagaagcctgcgaagatgtccatcatcaggccgcggttgtcgcagcggaaaacgccggcgtacttgccctcaaacgggacaactgcggaattgaagatgctgttggatgtggggatcagatcgcggggaatgatcggattgtggtcatagcgccatacgggcttgtcaaaaccctgcggcttgtcctgccagggcatatccgggaacgacttgccgatgatttttgccatgatggttcctccttgagttttaaaattattagagcaggctgcacagaaacttttctgtgcaaccgcttccatatctatcaatactataatacaaacagccgcaaaagtaaaggaaaatttttcgccgccagcccgcccccgaatgcgcgtgcgccgggcaaagcgccggcgggccgcgcggggcgcgcgcatgcacaaagcatcaaaatcaggcaacaaaatgcctattgcgcgcgccggacaaagccgctataatgaaaacaagatctctgaatttttcggaaaggacttgtattatggccatcacctttgacgcttccagaaaaatcttcaagctcgatacgccgtccacaacgtacgccttcaccgtgcacgaggcggggtatctcttccacctctattacggcgcgtatctgccggacgacaacctgctctttatgctcgaccgcggcatgttctcctccttctgcccggatttcccgcactatgtcgcgacgggcatctcgccggacgtgacgccgagcgagtattccgtggccggcaccggcgatttccgcgtttccgcgctgcagatccgcaacaaaaacggcgacgtttccaccgacatccgctacgtctcccaccgcatccttacggaaaagcccgcgctgtgcggcatgccttccctgcgcgacgagaacggcgacagcgagacgctcgagatcacggcgcgcgacgcggcgaccggcgccgtcgtgaagctctattacacggtgtacggcgacatgccggtgatgacgcgcagcgcagtcgttgagaacgattccgacgcggcgatggatctcgagcgcgtgtacagcacctgccttgagctgccggacttcgactacgacatggtgcacctctacggcaagtggttcaaggagcgcacggtcgccgagcgcccgctctgccatggcatccagtctgtcgcgagcaagcgcggctcctcctcgcacaatcacaacccgttcgtggcgctcaagcggcacggcgcggctgaggagagcggcgaggtgtacggcgtaaacctcgtgtacagcggcaacttcgcaatcgacgtggaggtggacggcttcaacacgacgcgcctgatcgccggcatcaacccggacggcttcacctggcaccttgagccgggcgagcgcttcaccgcgccggaggccgtcatggtttacacggacaagggcatgggcgagatgagccgcatcttccaccgcgcctacaaaaagcacctgatcaaaagcccgtggcgcgacgtggagcgcccggtgctcatcaacagctgggaggccgcctactttgacttcgacgacgacaagctcgtcgcgttcgcgcacgaggcggcgaagatgggcgtcgatatgctcgtcatggacgacggctggttcggccaccgcaatctggacaactcctcgctcggcgactggttcgtcaacgaaaagaaaatcaagggcgggctttcgaagctgattgagcgcgtcaatgccgagggcctcaagttcggcatctggtacgagccggagatgatctcgcccgacagcgagctctaccgcgcgcaccccgactggtgcctgcacgtcaagggccgcgaaaactcgccggcacgcctgcagtacgtgctcgacatgtcgcgcgaggacgtgcgcgacaacattgtcgagcagatgtgcagcgtcctgaaaaacaacaagattgactatgtgaagtgggacttcaaccgcaacatttcggaggccggttcggccctgctgccgccggagcgccagaaggaaatcatgcaccgcttcgtgctgggcacctacgacctgatggaccgctttgtgaagaccttcccgaacatcctgtttgaaaactgctcgggcggcggcgggcgcttcgaccccggcatgctctactactcgccgcagatctggtgcagcgacaacaccgacgcgatcgagcggctgacgatccagttcggcacctcgatgtgctacccggtttccgccttcggcgcgcatgtagcggcgcgcccgcgcaccccgctttcgacgcgcgcgaacgtcgcgatgtgcggcacgttcggctatgagctcgacccgcgcaagctcaccgaggaggaaaaagaggaggttcggcagcaaatcgccgactaccgcaaatacaaccacctcgtgcgcgacggcgacttctaccgcctgatcgcccccaccgacaacgccttccgctgcgcgtgggaattcgtctcgccggataggaacgaggcgatgctcacgagcgtcgtgatgcgccagccggagtcgatgttctacgtccagcgcctgcgcagcctcgacccggagaagctctacaccgatacggacaccggcgaggtctactccggcgcgctgctgatgaacgccggcgtgaacctgacgcaggccgttttcctcgacggccagagcgtcgtgaagcatttcatcgcaaaataaagcgcaccgcgcgctgaaaatacgcgcccgcccggcagcccggaacaatctggaagctgccgggcggttttttcaattttttctccactgcattttcaactctgcgtgacatgcctttgcccgctgaatttcatgcgcatatgcggcctccaaatccctatacagacggaagccaactagcgcgccgagtttaaaataacccccgctctgtgtctctgtaaaattagtcaaagcatcgtttatgcgatcgtcctcccgtcggaacgccggtacaatttcttccaattgatcgtaaagcatttcaaacgaattttcgatttctttttcaaaatcttcaatggccgattcttccagttcctctccccaaaggagataccgcaacaaattatccagcttcgtacgctcataaaaacctgcaagttccctcataactttcaattcctttcaaatttataatatcatgatgtcaataatttttttgaggttattttaatgttataatgacttcaaaataaagaaaggagcgttataatgggaagaaagaagggcgagcctaaggagtttgtcaaatttactttaagagttaatcccgaaacctacgaaaaagtccgttatatatctggacgcaatgggcgttcaatcaacagcgaaatagaaattttaatgatgcttcacgtggaaaaatttgaaaaagacaagggcaaaattacattagatgaatagcaaaacgacagccgcggcgtgccgggctgtcgtttttgctttctctgtattcgattacttcgtgcggccgatgtcgcggcggtagtgcgcgccgtcgaaatggatcttttcgaccgccgcatacgccttttcgagcgccgcgtcgagcgtttccgccgcggccgtcacgccgagcacgcgcccgccgttcgtcacgagcttatcccccgcgcgcttcgtgcccgcgtggtagacggtcgcgcccgcgacctgcccgttttcatccagtccggtgatctcgatgcccttcgggtacgactgcggatagccgccgctcgccatgacgacgcaggcgcacgcatccgcgctccactcgatctcgagcgcgtcgagcctttcgtcgatcaccgcgtcgagaatgtcaacaaaatccgtcttgaggcgcggcagaacgacctgcgtttccgggtcgccgaagcgcgcgttgtactcgatgaccttcgggccgtccggcgtgagcatcaggccaaaatacaggcagcccttgaacgggcggccctccgcctgcatcgcgcggatcgtcggcaggaaaatcgtctccatgcaggtctgcgcgatttcgtcggtgtagtacgggttcgggctgatcgtgcccatgccgccggtattcagtcccctgtcgccgtccagcgcgcgcttgtggtccttcgaggaaaccatcgggcgcagcgttttgccgtccgtaaacgcgagcaccgaaacctccgggccggtgagaaattcctcgacgacgatgtgattgccggaggcgccgaacaccttgtcctccataatcgtgcgcacggcgtcctttgcggcctccaggctctccgcaatgatgacgcccttgccgagcgcgaggccgtccgccttgacgacgaccgggaatttcccctcggcttcgatatacgccaccgcctcggccgggtcggaaaagacctcgtagcgcgccgtcgggatgccgtattttttcatcagattcttcgagaacaccttgctgccctcgatgaccgccgcgttcgcgcgggggccgaacgcgcgggtgcccgccgcctccagcgcatcgaccatgcctgccgccagcgggtcgtccggcgcgacaaagacgagatcgaccgggttttcctgcgcgaagcgcacgacgccgtcgatgtccattgcgccgatatcgacgcactccgcgtccgccgcaatgccgccgttgcccggcgcgcaccacagcctgccggttttcgggctttctttcagcttgcggacgatcgcgtgctcgcgcccgccgctgccgattacaagtatattcatatccatcattcctctgttttaatcttcacaaagcatccaagccgtgcctgcaaaacacccgcgaaaatttttccgtcggcgttggcttcacccatttctacctgcggcgaagcctgcttcggcaggcgaccctgcagcagccgccgcgggccgcgcccgctcaatggtggaacaggcggatgccggtgaacgccatcgcgatgccgtacttgttgcaggtgtcgatcacgttgtcgtcgcggatagagccgcccggctgcgcgataaattccacgccgctcttgtgcgcgcgctcgatgttgtcgccgaacgggaagaacgcgtcgctgccgacggaaacgcccttgaacgtctggagccacgccgccttttcctcgcgggtgaacacctcgggccgctcggtgaagaactgctgccacgcgccgtcgcgcagcacatcgtcgtgctcctcgctgatgtacacgtcgatcgtgttgtcgcggtccgggcggcggatgcccggcttaaagggcagattcagcaccttctcgtgctggcggagataccagatatccgccttgttgcccgcgaggcgcgtgcagtggatgcggctctgctggcccgcgccgatgccgatggcctgaccgtccttcgcatagcagacggaattcgactgcgtgtatttgagcgtaatcagagaaatcacgaggtcgagcttcgcttcctccgaaagcgtcttgttctcggtgacgagattgttcagcatctccgcgtcgatcttcagctcattgcggccctgctcaaacgtgatgccgaaaacgtccttatgctcgatcggcgccggcgtgtaatccgggtcgatctgcacgacgttgtaggtgcccttgcgcttcgtcttgaggatttcgagcgcctcgtccgtgtagccgggcgcgatgatgccgtccgaaacctcgcgggccagcagcgtcgcggtctccttgtcgcagacgtcggagagtgccgcccagtcgccgtaggaggacattctgtccgcgccgcgcgcccgggcataggccgtcgcgatcggcgaaagcgcgagatcatcgacgaagtagatcttcttgagcgtgtcgctcatcggcttggcaaccgccgcgcccgcagggctgacatgcttgaaggaggccgccgccggcaggcccgtcgccgctttcagctccttgacgagctgccaggagttaaacgcatccataaaattgatgtagcccggcttgccgttcagcacctgaatgggcagatcgcggccgtcgttcgtgaagattttagacggcttctgattcgggttgcagccgtatttgagttcgagttctttcataaccgtaacagtcctttccccaaaatcactggttcttgttgacgatgcgcgtctcggctttgcccgtcttgaggttgatgaagcgcgtaaacagcgaaaccttgttgtcctcgttgaggttttgccagaggtcgttcgtgaacgcgtcgatgtcgccctcgatcttcactggcttcggctcgccctcaaaggacgggatgcgcggcgcgccgtcgcacttataggtgtggatgaaatggccgaggccctcgaccggcgtgtagtcgaagaagaagctctgcggcgcatccgggttgccctcaaagctcttgagaatcgagagcttgtaggtgaagtcgccgtccttctgcttgacaaggccggaaattctcggcgtgaaattcggcgcatccggctcaaactcgcgggttttgagcgcctttttgaagctcttcccctctttgagatacataaaaatcgtgtcggtctggtcgccgttcgtgacgatcgtcttgttcgcgagcacgcgcaccggcgcgtagatcacgagcgacgggtcggagagcttcgccgggtcaaacgcctgcgtgcggatgccgtcgccctgctccacgaacacgcggttgcgcgagttgacgctgcggcccatgatgaaataggcgatcacggcgtgaacgccgtcggcgctcttgccgatcacaatgccgcggcccggataggaattgcccgcaagctcctttttgatgtcgagaatttccattttcattccccttccttagctttcagaattcgacgcggccgcacgttttccgtgccgcgccgcatcaaatcgatatatgaaaatatgtgcagatgtcgtttttcactctgaaatcgtcacgaccgccccgttcaccgagagccggccggcgcagaacagcgagaccgcctcgggcagaagctgccactccgcctgctccatcacgcgccgctgcagcgtttcgggcgtgtcgcccggctccaccggaaccgccttttgcaggatgatcggcccgccgtcgcatacctcgttgacgaaatgcacggtcgcgccggagagcttcacgccgcgcgcgagcgccgcctcgtgcacatgcaggccgtagtagcccttgccgcagaacgaggggatcagcgccgggtggacgttgatgatccggttttcaaacgcctttgtaaacgccgcgttcgtgatcgtcatgaagccggccagcacgatgaggtcggtttttttctcccggagcagcttttcgagcgccgcgctgtaatcatcgacgctctcaaaatcctttcgggccagcacgacgccctcgatgcccgcatttttcgcgcgctcgagcgcatagacgcccggcttgctcgcgacgacgaccgagatgcggccgttttcgatcttcccggccttttccgcgtcgatcagcgcctgcaaattcgtgccgccgccggagacgagcaccgcgatgttcagcacaggacgaccccctcgtccccctcgacgacctcgccgagcacgaacgccttttcgcccgcctcgttcagcgcgcggatcgccgcatcggccgtctccttcgagaccgccatgcacaggccgacgcccatgttaaatgtgttgaacatatcgtgctccggcacattgccggcctttgcgatcaggtcgaaaatcggcagcaccggcacggccgcgcggtcgattttcgccgtgaagcccgccttcatcatgcgcggaatgttctcgtagaagccgccgcccgtgatatgggagatcgccttcacgtccgccacctcgatcgccgcgagaaccggcttcacatagaggcgcgtcggctcgagcagcgcctcgccgagcgtgcagccgagttcgccgtaatacgtttcgagcttttccttcgtcaggccgagcgccttgcgcacgagcgagaagccgttcgaatggatgccggaggacgcgacgccgacgatgacgtcgcccgcctgcatcttcgagccgtcgatgatcttatccttgtctacgatgccgaccgtgaagcccgcgaggtcgtactcctcctcgggcatgacgcccgggtgctccgcggtctcgccgccgatcagcgtgcagccggagcgcacgcagccctccgcaacgcccttcacgatctcggcgatcttctcggggtagttcttgccgcaggcgatataatcgaggaagaagagcggcttcgcgccgcagcacacgacgtcgttgacacacatggcgacgcagtcgatgccgatcgtatcgtgcttgtcgagcagcatggcggcgacgagctttgtgccgacgccgtccgtgccggaaacgagcaccggctccttcatgccggaaagctccggctggaacaggccgccgaagccgccgatgccggaaaccacgccgggaatcgccgtgcgcttcacgtgctccttcatcagctccacagatttatagccggcggtcacgtcgacgcccgcggccttgtagctgtcgctaaagcttttcattttctatatctctccgtttctgaaatcaatgggggggttacataaattactttttctcagcggaatgcttcggtccagccgccgtttcggaacaccggcacggttctgccgtccgccgtaacgccgtcgatgttcagcgtgccgccgccgatcatgaaatcgacgtggatcaccgaatcgttgacgcccttttcgtgcacctgctcgagcgtcatgctctcatagccctcgacaacattcgggaagcccgcgccgagcgcgatgtggcacgcggcgttttcgtcgaacagcgtgttgtaaaacaggatgccgaggttcgagatcggggaatcgtgcgggatcagcgcgagctcaccgatctgcgccgcgccctcgtccatcttgagcatctgctccaaaagcgcctgccccttttccgccttgcaggagacggcacgcccgtttttaaaggtgatcgagaaattctcaatcagattgccctgataggagagcggcatcgtcgcgacgacggtgccctccgcctcgcccttcatcggcgaggtgaagatctcctcggtcggcatgttcgggttgtagaacgtgccgtcgagcagcgtgtcgccgccgcccatccatttcgccccgggaatcaggccgcaggtgaaatcggtgccgttttcgctgaaatagtgcaggctgcggaaattacaggcgttcagcttttcgtagcgcgatttaagcgccgcgttgtgcgcctgccacgcctcgaccgggtcgttgtctttcgtgacgcgcaccgtctcgaggatcgcctcccacagcttctgcaccgccgcgctcgcgcgcagctcggggaaaaccttcttcgcccacttcgcgctcggcaccgcgacgatcgtccactggtgcttgttgtccatcgcgtcgcggtacggctttctcaccttcatgcgcgcgaggttcgccttctgcatcttctccacgttgacgcccttgaggccgtccgggtcctccgattcgatccagatgcgcactggcagctcttcaacctgctgctgcatgcgcattttctcccactccggcgtgttcgagagcgttttgaggctctcctttttgagctggagttttgtgaagctctggctcgtccagcgcatatcgacccacttcgcgccggccctgtacgcttcctcggcgacgagcagcgcgaactccgcctgatcggtctccgccatgatcagcgcgccctgcccctttttgatgttgacgcccatgcggacgacgaggcgcgcgtattttttcagaatcgttttgttcattttcaagcccttccgtatcgccgccttacagcgccgcgaccttttcctgcagcgccgcgtttttcttctcgacgcccttttccatatcgatcttcatctgctcgagctgcgcggcaagcgcgtcgtcggaaagcgcgagcatctgcgccgcgaggatcgccgcgttgtccgcgccgtcgatcgcgaccgtcgcgaccgggatgccggagggcatctgcacggtggagagcagcgcgtcaagtccgtcgagcgtggaggacttcaccgggacgccgatgaccggcagcgtcgtgtgcgccgcaagcacgccgccgaggtgcgccgccttgccggccgccgcaatgatgacgccgaagccctcggccttcgcattcttcgaaaattccgccgctgcatccggcgtgcggtgcgcgctcatcacgcggacctccaccgggatgccgaagcccttcaggcgcttgacggccggcgccatggtcgggaaatcgctgtcactgcccatgatcacggcaactttcttgctcataaacattcaccaatccttccagtaatcgcagccctgctgcgtgcaaaagaaataggctgtgccaaacacacagccttacgctttaaaattggccgcaaaaccccgcggcagacatgaaaaacccgcacatcagacaattcatcccgcacctccgcgttttgcttccgcaatgatttacaaggttattttacgggattttgtggcgtttttcaatagtttttgcggtttttatatgaaatcataaaattctgccgcacgccgcggctccgtttgtcgcaagcggcaacaagctaaatgcgctttacggggtgccgccaatactgcacttcgaaaaccggcgtgaagccgaatttccggtacagcccgagcgccggcgggtttgcggaatccacgtcgagctccagcgcttttccggcctcgaacgcgaggttcagcgccgcgcggacaaccgcgtttccgtaccctctgccgcgcagcttttcgggcaccgccacgccgcagagcgtgagcgcctcgcccgccgcgagcgaaaagatgccggcgggcgcgccgtctgcccgcacgagataggcgcggcgcagcgcagaggtcagcgcggcctccgccgtccggcggtcctccccgtagacctcggcgctgacggcggcaaaatccgcgagcgtttcgcgcgtgacgggcacggccgtacagccctccggaagcggggcgaaatccggcgtgcggcgcatgcgccactcggtgtggctgtgcgccgccgccggaaaatgcgcccgcaggcctgccgcggccggcgcgccctgcggctcgagcgcaaagaggaaatccggcacgccgaggccgccgagcaccgcggccgcctcgttcagaagcgccgtgaaatgcccgcggccccgcgactgcggcgcggtgaagcccgtcacctcgcccgcctgccgctccggcagaaagagcgagaggaacgaaacgagcgcgccgtccgcccgccccagaaagaagcagggcgcgctgcggtcaaaattgatctcatttgaaagccacacggcgttgtgaaggccgtccgcctcgaaaacggcgcgctgcagcgcttccacctccgcgcactgcgccggcgtcagcgccggatgcgcctcgacggcgaacgtcatcccttcaccacccttccgaaatggtcgagcatcttcgtcggcgcctcgggcggcagctttttatagacgcggcgcaccgcgaagaacagcgcgacgacgtacgcgccgagcatcacctcgaccgcccagagcgcggtcagcgtgccggtctggtacaaagcggcgaagaaatcgatgcccatgtgcaggaggatgctcacgggatacagccagaatttgttcaggcgcacggccgcgaacacgagcacggaaagctccacctgcagggccagagagcaggcgcgctcgaagcaggcgagcgccgccgtgccggggccgaccgcgttgatgtccgcgatcaccgccgcgaccgcctcggtctgtcccggcgaatactgcgcgatgaacgcctcggcgcccatcgaattaaacatggcggcgagcaggagattcgagatcatcgacatgccgagaatgatgaagcactcgatgccgccgtggccgaggccgtaggtcaccgcattttcgcggccgatgttcctgcgcatcatcgttttaaacacgaggaagcgcgcagtctcctccatcaggccggccatgaggccgccgtacacggcgtagagccacgggcggctcagaatgaaatccgacaccgcagaattcaggccgagcacgaggaagtggatgatctgctcgagcaccatcgcaaagacgaagaacgccgccgcgcccatcagaaacgggctgaggctcgcatccgtctttttcttccagatgatgatcgccgcaatcggcagggcgagcgaaaagagcagctccgcgcccaaaataataaaaacggaattcgaaattacaatcgattcggtcatgtctgttttcctttcccttcgaagtcgatcagcagcgggcggcagggcgaaccgtccagcccctgcattttgagcggcgcgcacgagaggaaatactcccctgcgggcacgtccgaaagcacggcggattcgagcagcgcgatctccgccgaaagcagcgcgcggtgcacggcggcgccggtctcagggccgccgaccgtcatgccctccacgccgagaaaccacagcccggcgtctgcaaacatttgggccgcctccaccgtgatctcaatctcgccgcggatcaaaagccgccgcacgccgccctccatgagccggcgcgcgtccgccgccgtcaaaacgccgtcaaaccgcgcgaccgtacacgggccgacgcatttttcaagcggcacctgcgcgatgtccttcgcgcccgccacgaaatgcttcggcgcatccatgtgcgtgccgttgtggctgccgagcgtcaaaacggtcaggttgcacgggcatgtctcggaaatcgtcagaaacggcgttttcgccggcgccgggtcgcccggaaacaccgccgacgaaaaaagctccttggacaggtcgtaaattctcatgtgcactccctttccttctctttctgccggcacgccgaagcggacgggacaaagccccgtccgccggtcagcgaaacagcgtgcaggcgccgctctcgcggtagtagcggatccgcttctcgatctcctcccgcgggcagcggaagtaatccgcgaggcaggcgatgcagagaaaatcctccgcgccgcgccagacgagcttgcggtaaatcgcgatgtcgtcgcccccgagcggcgcgccgcaggtgcggcaggtcttgtaatccgccatcagcgcagcttcacgggcttcgcgataaacaccatcgagtcgtgcggctcgagcaccgcgacgtaacgctccgcaaatttgccctcgttctgcttcgtgtagcagttgtaaaattcgaggccgcggttcgccgcataggggatgcccatgtcccagaactgcagcgacatttcgctccgcacatcgccgaggttgacgaagcagatcgcgagcgtgccgtccgaaagcggctttacgagcgccatcacgctctccgggttgttccactggcggatgcagtacggcccgcggcactcaatgtcctggttgatgcggatcaaatcgtcattgccgagcgtttcgagcgtcgctgcagacatgctgcgcacgtcgcagccgatcatcaggggcgagcccataatggcccagagcgcgaaatgcgtgcggtactccgtgtcggtgcatgcgccgagcgcgccgatgaactcgttgttgctcgcgccgtgcatgccgacgacgagcatgtcgatgtcgttgtggcagtaggggcccgaaaacgcggtcttgtcgagctgcgagaggaacaggtttttcacggactgccagttgtcctgaatgtcgccggtcgagcggaaaagctgcgcgcccgagccgcgcacccagctgtgcacgttttcatgcccccagttgcaggcggaaagcacgatgtcgcgccccgaattgcgcagcgcgagcgacatgcgcttgtagaggatctcgccgtcgatgtgctggggcttatagcagttgtcgtacttgaggtagtcaacgccccacgcggcaaactgctccgcgtcgtcgaactcgtgctcgaagctgcccgggtagcccgcgcaggtgtgcgtgccgcagcacgagtaaatgccgaatttcagccctttcgcgtgcacgtagtcggccacggccttgatgccgttcgggaatttctccgggtcggcgacgaggcggccgttttcgccgcgctgcttgaggctccagcagtcgtctacgacgatgtactcgtagcccttgtccttgaggccgctttcgcacagggcgtcggccgcgccgcagatgagcgcttcgttgatgttccatgtaaaggtgttccacgagttccagcccatcggcggcgtcatggcgaggtatttgttctgcatagttttctttcctttccggttctccgtcacgcattttcgagcgccgctgcggacgccttcaaaagcgcgatacatttttcagccgaatcccgggcgaaggtcagaaaatccaccttgccgtcgtcgtttgcgttgtcggagatcgcgcgcaggccgcagaacgccgtgcggttcgccgcgcagacgtgggcgatcgcgccggtctccatctcgcaggctacggcgccgaattcttcgcgcagcgccgcgcagaaattgggatccgccacaaagcggtcgccggtcgcgatcacgccgcggtgcacgccgctgtaaatctcggcggcatactgcgcgaggatggcgttgtgccgctcgctcgtgggcagctcggccatcaccgttcccccgacatcgacagccgccagcggctcaccgatggccgtcgtgtcgtagtcgtactgcacggcgtgcgtcgcgacgacgaggtcgccgattttcacatccggcccgatgccgcccgccacgcccgtgctgacgacgagcgacggcgcatagcgcagtaccatcgccgccgcgcacatggcggcattcaccttgcccgcgccgcatttcgcgacgacaaccggcacgccgccgagcctgccgctcgtaaacggctggccgcagcacacggccggctccggctcttccagcgcggcgataagccccgcgacctccatctccattgctccgataattccgatcatgcttttctcctctgcctccggaatcggcttccctcagattgtaccacctgcggccggctccggcatcccttatttgttgtgcattgctgttattttgttgcccgcgtcacttaaagcgcttgccgagcttttcgcgcatgaaggcggcaaactctgcggcgtcgccctgcttgaagccgtccttcgcgataaaatacgtgttttcctcgccgaaatacatgtagaagctgtccttcgtctcgtacatccgcgtaatctggaagtacgggtgcaggttcgaggcctgcaggcccgtgatgcggaaatcgccctcgtagaaatagtaggcggccttgcggcttctcatcttgctgtacgagcggatcatcgcctttgtgaccgtcgtgctcgcggtgccgatcttgtagccgctgtacacaatgcacaggccgagcaaaaggagcatccaccagttgtcgctcgagccggactgccacaccacgtagaaagcgacgagcccgatgacgatcgtaaagagcggcagccacaggtggcggcggtacgcgtggaaattcgcgaaaaccttgattgcgttgtcgctgtgctccgtctcgttcacaaagcgcagcgcaccgtcgccctcgtcctcatggccgagcttcgactggcggtacgcggcgaggcggtccgccatcgcgtgcttctcgcgcttgtcgcgccggttcacgaccgagcggtacacgaagaacgcgatgatcagcgcgagcagcaccacgagcaccacgagcatccagatggcctccgcggtaagctccgtgctcggggcctccataaactccgaaaacaccgccgaatcgacgatctgccgcatcagcgcgtcgtattcctcggggatctcctcggtgccgttgtagaggtcgaaggagacgagcttgccgtcgaaaatcgtgccgtaaagccgctcgtacaccgtgctgtcttcctcgaccgcgtcggagcggatgtcgatgcagaaaaacgggattgcctcgtggtcgtaccactcgacgctgccgtccgtgcgcccgtccgctgaggcgggctgcatgcgctcgatgaagtcggccttcgtctcgtcgtcggcgttgttcaggttaaaaatcgccgacgaatagtcggaggtcttggacgacaccgcgatgacgcagtcgccgccgaacgcatagatctcggcgaggatgccgtcctcgctcagcgcgctgatcttctcgctgatgtcgagcacctgggccgtgctccagaccgggtcgtccgctggcgtatccgcggtcagaagctgcgcgccctccggcagcgtaaccgtcatacccgtgtccggcagcgtgtaggtcgtttccgccgccgaagcaggcagacaaaacgcggctgcaagcacaaaaacggcgagcaggaccgcggtaaaacgtcccaatgttctttttctggtattcatgtttttgccgatcctttctccgcgccgggccgccgcccgggcgaattcaaaaagtgttaaggccattgtaccacactttcgcaaaaatttgtactgtcttttcccgatttttttcatttatttacaaattggacaaaaaggaatttgacaccgcacgcggcgggcggtacaatgggaacacaaatatgcggcggcgccgcacgggcgcggtatttttttccaaaatcagcccatagtaagacggaaagccgctgaaaaaaggagacctgcacgatgaaaatcgccgtgatcaccggcgcgtcctcgggcctcggcgtggagctgctccgcgccgccgccgaactctgccccgacatagacgctttctggctcatcgcacgccggcgggagcgcctcgaagcgctcgccgcacagtttccgggcaaaacactgctgcccgtgccgctcgacctcaccgaccccaccgccctcaagagccttgaatcgcttctggacgcgcagaagcccgcggtgtcgctgctcatcaacaacgcgggcttcgggcggctgtgtgatttcggcgaaagcgaccctgccgaccagaccggcatggtcgacctgaactgccgcgcgctgaccgccgtgacgcgctgctgcctgccctatatggcggcgggcgggctgatcctcaatgtttcgtcgatcgcatcgttcgcgccgacgccgcgcatgaccgtgtactgctccacaaaggcgtatgtgcagagcttctcccgcgcgctgcgcgaggagctcaaaccgcgcgggatcaacgtgctcgccgcctgccccggcccgatggatacggaattcctgcccgtcgcgggctgcgagcgcggcaaaagccgcaccttcgacacgctgccgcatcaggaccccgccaaaatggcccgcaaggcgctttcagccggcctgcgcgggcgcagcgtctgcacgatgggcgccttctacaaattttaccgcttcctcgcccacgtgctgccgaaagccctgctgatgaagctcacgcgctgctgagctgcacgaaagccatcgcgtatacggcgaggtagtagagcaaaagcgcgccgttgcgctggcggtcggtcgcgccggaaagcgcgtccttcgcgacgaatacgtccgaaacggcgaacgccgccgcaccgagcgcaaagcccccgtaccgcggccccgccgtgaacggcagcgcggcggccagcgccgtcatggcggcgagcacggccgggtagagcagcagcgccgcccccttgccgccgagcgcccgaagctcccggtaaaacaggatgcccgccgccagaaacagcgcgaggccgagcggcaggctcgcccataccggccgcgccgcgccgaggatataggcgatgaacgcggcgtgcgccagcccaaagaccgcgacccccgcggcaaagctgcgctcgatcagaaaatccgccgcacagcacagcgtgagcgccagcacaagcagccagcccgcggcgccgctgccgtacagaacggcgccgagcacagccgtcgccacagccacgaatgtcgcgccgcacttcgccgccgagcgccacagcgagacgcccagcgggcgcgtcgccgcataaacggcgaaaaacgccgccatgagcggcagggaaagcgccgcccacaccgagggaaaatccttcatttgcaccgcatcctctcttttccggatcaaaacacgggtttaaaaaccaaaagcatacgataaactatgccgtgcgcttccagtataccacgcggaaaataataaataaacccgccggcaaccaaatcaggaagggtccggtaccggcgggttttgtcgtaagcgatggaattgttttcgcaggagcgcattccctcccgcagctatacaataacatatacgcttaaaatttacaacaataatctcaaatttcgtaaagtttatttctgatttgccgctttgcacagataaatcagcagcgcggctgcaccgttttccttagtttggcacccatttcacaccgtgctaaactgaaagcggccaaaatcgaatcaaaaaatgcaggacaggaggccgaaaagatgatattgtgcattgtccacgctccatgcagggtctgatcccggacgggaccgcatggagccaatgaccgtccgcaggctttgcatttccaaaacagaaaatcactgtaaggagcaaagtcaccatgaaaatatacaagacaaacctttccgccctgcgcccgcttcgcccatttctgctgctgtggtccacgcaggcgctctccgccctcggcagcggcatgatgagcttcgcgctcgtcgtctggtcttacgggcagagcggctccgcgctcagcacggcgctgctctcgatctgctcgtatgcgccctacgtgctgctgagcatttttgccggcgcgctcagcgaccgctggagcaaaaaggccgcgatgctcgtctgcgacctcttcgcggcctgcacgaccgtcgccgtgctcctcctgctgcataccggcagccttgccgtgtggcatctgtacgccctgaacgccctaaacggcctgatgaacaccgtgcagcagccggcctctgaggttgccgcaacgcttttggtgccaaagcggtatttccagcgcgcgagcggcctgcgctcgctctccggcgcgctgaattcggtgctgacgccggccgccgccaccgcggtgctcgggctcttcgggcttcgcgccgtgctcgccgtggacctgctcacctttgcgctggcgttctgcacgctgctctttggcatacggatccccaaggggaacgcagacggctgcagagaacccgtgctgcgcgccgcggggcgcggcctgcgctatctcgccgaaaaccgcggcattctggacctcatcctcttcctcgccgccatcaatttcaccgcctccgtctacaacgccgcgcttcccgccatgctgctcccgcggcagaacggcggcgagggcgtgctcggcgccgtgaatacctgcgccggactcgcgatgctcgcgggcagcatcctcgtctccctgctccccgcgccgaaaagccgcgtgcgtgtgatctgcaacacgctgctgttctccatgagcacagaaaatttcctgctcgcgttcggggcctcgccgcccgtgtggtgctttgcggccgcactcggatggatcggcatcccgctgatgaacgccaacatggacgtgctgttccgcacgcgcatcccggtcgaaatgcaggggcgcgtctacgcggcgcgcaacacgctgcaattcttcacgatcccgctcggctacctcgccggcggcttcctcgtggacagcgtctttgagccgttcatggcggcgcagcccgccggcagcctcctcagcgctttgttcggcgcggaaaagggcgcgggcgccgcgctgctgttcctcgcgatcggcttcctcggcgttttcacctgcctgtttttccgccgcaggccgagcatctgggcgcttgagcaaggcaccccgcccgaaaaaagcaaatcgcttcacaaaagcgaataaaatatccgggaccgccccgcgcagccaagctgcgggaggcggtcccggtttttcagcgcccgttatacatatttctccgcgataaacccgccaatctttttgttttccatccatcatgcccctttcctgttatgccttctgccataagcatagcgcaatacggagcgaaagccaataaccggtgcgttgaatttcagcggcgcgctcaacctgcggttgcaaaaacccggccgcacaggctgcagggcctgaaagccggggttttctctcttgatgcggattacagcagcacgacgcccttttcggcgcagattcgggcggtttcctcgtcccacagggaggcctgcacctcgccgatgtgcaccttgccgagcagcagcatgcacaggcgggactgcccgatgccgccgccgatcgtgagcggcagctcgccgttcagcagcattttgtgaaagggcagctcgccgcgcgcctcgcagcccgccgttttgagctgcgccgcgagcgactcggcatcgacgcggatgcccatgctgctgatctcgatcgccgtgttgagcggctcatgccagaaaagcaggtcgccgttcaggctccagtcgtcgtaatcgggcgcgcggccgtcgtgcggccggccgcttttcagcgcgccgccgatctgctcgatgaacaccgtgccgtgctcgcgcgcgatcacattctcgcgctgtttcggcgtaaggtccgggtagcggtcctcgagcgcctgcgcagtgatgaagaacacgtcgcggcacagctctgtggaaagcccggagaactgccatttcagctcgtcgagcgtgccgcagatcgcgctgacgatccggcgcaccgtatcctcgaggtacgccggcgtgcgcatctcacggtcgatcaccttttcccagtcccactggtcgacgtagatcgaatggaggttgtcgagctcctcgtcgcggcggatcgcgttcatatcggtgacgaggccgttgcccacaaaaaagccgtagttatacagcgcgaggcgcttccacttcgcgagcgagtgcacaacctgcgcgttcagcgcggcggccggaatatcaaaatccaccgggcgctccacgccgttcagatcgtcgttgaggccggtcgccgggtcgacgaacagcggcgccgtgacgcgcttcaggtgcagcgcggcgcagattttgacgagaaaaacatttttgaccagcccgatcgccttctgcgtctcatagagcccgaggctcggcgcatacccctccggaacaataaccctctgcatagacaaccacccttttctgcaagattcaccgcgagcgcctgcattttcgttacagaccatcaaggcgatacgcggagctgtttctgttattgtactgcaatcctgccattttgtaaagtaaaaactgcaaaaggggcaggccgttttcagcccgccccaaaaatatgcgtttttatccgccggttcacatcgcggagggcgtgcgcagcgaggcaaccctcttgttaaactggatgatgcagatgccgaacacaatctgcgcgccggcggtacaggcattgcgcagcgccgcaagccagccgctgaacacaacggtgccgtacaggtcgatcagcgcatagcccgccatgaggaagccgagcaccgcaacgaacatggaggcttttttcagcatcgcactgcccgcggccgccgctttcgcggcgttgatcgagccgatcacctttgcgctgtaaacgatcaggagtgcaatcaccgcgagaagcgccagcaggatgacagccagcgtagccatcgcagcgccgacgaaatcatagactccactggctgaaacagcggtgaccagcacgatcaccaacaggatgacgagcagcagcgccagcaccgcatagccgacgaccgagaacacctgaagaaccttcaaaattgtgaggccggaggtcttgagcgtcgggctgctcccgcttttgccggacgcaaaggtcatccagagcccggccacggccagtgccgagaggatcaggccgggaagctggaataggaaggccgtgagcacggagccgtcctgaagcatgtagagctgatattgcaggtcggaaaaatcgagcgcgtagtaaacctccggcggcagcatgctaaacagccgggcgtaattgaccgggatgaacgcggaaatcaggctgagcaggaagcccagcgacacaaaaatcgtgccgatcaggaacagaggtgacgcggccagcgacttgaccgccgcacacgccgccgcgaacgggcgcgcctgctgcgcgggctggtacgggtacgccgcgcgcggcgcatatgggttctgcacgtacggctgtgcgtacgggttctgcggctgatatgtatccgtatacggctgcccatacggcgcaggctgctgggcatacgccggcgcctgtgcaggctgtgcggccgaaatgactggcgcgggcgcttccaccggcgcggcagcctgcggttctgccggcggttctgccggcggttctgccacagcgggctgctccgcgggctgtgcggccgaaatggccggcgcgggcgcttccaccggcgcggcggcctgcggttctgccacagcgggctgctccgcgggctgtgcggccgaaatggctggtgcgggcgcttccaccggcgcggcggcctgcggttctgccggcacattctgccccggctgcaaattgccgcaggcgcagacggagccgtcctccggcagctttcttccacaatggatgcaatacataggacttccttcctttctatttccaatcccaaattccaatcccaaacggatcgctccgtttttcccaatcagtggtacaccgcgacgatctcaagattttcgtcgagcacgaccagatcggcgcgcttgccgacggcgatgctgccgatttccttctccatgccgatcgcctccgcgggcgtgagcgtcatggcgcgcacggccttctcgagcggaatcccccacgaaacgaggtttttcagctcgtcgtgcagattcgtgaccgagcctgcgatcgtgccgtcctcgagcgttgccttgccgtccttgacggtgacgaggttgacgccgagcatgccctgcccgccgtcctccatgccggagaggcgcatcgcatcgctgacgacgcagacgcggcggggcatcagcttaaagaccgtgcgcacgacggccgggtgaatgtggatgccgtcgcagatcagctcgccgcgcacggtatcggtgtcgaacacggcgcccacaacgcccggcgcgcggtgcgtcatgccggacatcgcgttgaaaaggtgggtcgcgtgcgtcgcgcccgcctgaaacgccgccttcgcgccctcgtagcccgtcgcggtgtgcgcgaccgagaccgtgcagagcttcgaggccttctcgatgaagccgccctttacgtcgcattcgggcgcgatgtccacgagcttgatgatgccgccgcagccatcgtaaagcgccttgaacacgtcgtaatccggcgcctgaatgaattcgtcgccctgcgcgcccttcttggccggagagataaacggcccctccagattgacgccgacgatccgcgcgccgtccttgtccgccatgcagcttctgaccgtttcaagcgatttcgcgatctcctcgttcgagacggtcatcgtcgtcgggcagaacgaggtgacgcccttcgtcaaaaggaatttcgccatttcgcgcagcccctgcgcatcggcatcgcaggtatcggcgccggcgccgccgtgcacgtggatatcgacaaatccgggcacgatcgtgtagcccgcgcagtcgacgacgaggtcgtgctccgtgtaggagagcgtatccgcaaggcggacgatccgctcgtcatcgatctcgatgtcggcctttcggaggcggaagtcgccgtccagaatctgtgcgttgataaaaatcatctgaatcaccaatccttgtttttcgaaatccggttcggcaccggcggccgttttttatcttccgggcggcgggccgcccgctcagagcatatcgaggagcacgagcagcgtcacgcccggcacgccgagcgcggcggaaacgagaacgctcagccggctgaccggcaccgcgataccggtgtacggcgcgagcaggtacagcgccgcgagcgcgccgacgccgagcagcgccgagccaagcagcgtttttataaaccgcatacggatctctcctttgccttttttagaaagccggaagcccgggaatctctctaaagctatatgcgggcaaaggggaatttatcgcatcaggcctgcgcttccttttcgagatccggcaggaaatcgaccttgccggtcgcgacgtacgccgaagccacgatgatcggcagcgcggtgccgatggtcagctcgcgctttgcgctgcggtgcgtgatgaggccgtcgaaaacaaactcctcgccggtgaagctctcgagcgagacaaagccctcgacgctgttttccagccggacaaaaacgccgcgctgcgtcacgccgctgacggtgccctcgaaatgctcgccgatatgctggctcatgtactcggccatgtagcagtcctcggcgtcgcgctccgccatcagcgcgcgcacctcattctgcgaagattcccgcgcggcggtctccacaaacgcgccgtagcggcggcgcacctcctccgccggcatgccaccggcaaaggcagagagaatgcggtggatcgaggtatccgggtagcggcggatcggcgaggtaaagtggctgtaatccgcgagcgcgaggccgaagtggccggtctcctcggtcgcgtagcgcgccttctccatcgtgcgcagaagccgctgcgagacgagctgctcggtcggcaggccgcgcacgcggtcgagaatcgcggcgaagtcctgcgtctccggcttcggcttttcgatctcgcggcacggtacgccgacgagcttcaggagcttaatcagctcctccacgcgcttcgggtccggcgtgccgtgcacgcggtacaaaaacggcagtttatggtcgagcgagaactttgccgccgcgatgttcgccgtgatcatcatctgctcgatgagctgctccgcctcgcccgaaacgcgcggcatgatgtcgatacacacgccgttttcatcgagcacgaagcgggattcgccgctgtcgaaatccatcgtgccgcgggccgaggaattctccttcagaatgtctgcgagctccttcgccgtccgcagggattccatgaccggcgcgtatttttcgaggatctccggcgtcgccgtgccgtcgagaatcgtattgacctctttgtacacgccgcgcaccttcgagttgataaccgtctttttgaaatcgtagcccgtgatctttccgtcgctgtcgagctgcacgagcgccgagaacgcgagcttgtcggtgccggcgttcagcgagcacgcgccgttcgagagcacctcgggcagcatcgggaccacgcggtcggcaaaatagaccgacgtgccgcgcacgagcgcctcgcggtcgaccggggtatcctcccggacatagtgggaaacgtccgcgatgtgcacgccgagcgcgtagccctccgccgtgcgcgtgacggagatcgcgtcgtcgaggtccttcgcgtcggcgctgtcgatcgtgaagatcgcctcgccgcgcaggtcgagacgcttttcatattcctccgcgggaatcggcgcattgccgacgttctcggcgtgctgcagcgcctctgtggggaacacggtcgggatgccgtaccgctcgatgatcgcgtccgcgcagacgcgcgcgctgcggcccgggccgaacaccttctgcacggccgcgcgtgtccagtcgccgcggtagtcctgctcgagcgagacgagcaccttgtcgccgtccttcgcgccgttcaggtcgcgctgctgcagctttaaattgtagcggatcgcgttgtcggggatcacctcgacgccctcgggcgtcaccgaaacggtgcctgtcgtctccgccttcttgtgctccacgatgctgcgcacgcgccccgcggggccgcggtcctccttgcggatatcgccgacgatgatcgtatcgccgacgagcgcccccttgagcgcgctgccgtggatgaaaatatcctcgccgccgtcgaccgggcgggcaaagccgaagctcttcgaaagcgagacgagcgttgccgtcacgtcgtcctcgaccgggatcagcttcacgttgtgctggcggtccatcaaaatcagccgcttatcctttaagctgtgcagcgcgtcgtaaaacgcgttctcgttcgaaatacccgatttgcgcagcagcctccgcgcgccccagtcgtgcacctcttcctcgcgcagcgccgtgagaatcttctcctccacgctgctcagcacggcgtcgcttttccgctcgaagcggtttcttctttgaaagccctgctttctgctgtcatttcccttgtactgtttcatcattttatcctatccaatccgattccaatcattctgtgctcttattctgccacagaaaggcgccgagtgcgcaaaaatctctttaaaatttctgtaatctttcatcggtccgcgaaagtctccggaccggcgggcgcggtgtgcgccgcgctttcaaagcccctgcacgacggcgcggaaaatatcgcctcgctcggcgaagctcttgtacatgtcgaagccggtcgccgccgggcagagcgacaccacgccgccgggcaccgcgcggcttttcgccagcgcgacggcctcctccatcgtgcaggcatgcagaatttccggcgcgcccgcgctgtaatttgcggcgccgcgcactgccgcctcgatcttttccgccgccgcaggcttgaagcccgggagcggcttttcgggcgcgagcagcacgagcgtgctgaccttgtcgcagatcacggcgccgagttcatcgaacggcacctttttgtccgcgccgcccgcgatcatcacgatcttgaagtcgtagagcgagagcgtgccggtcatcgcgcgcgacgggctcgtggcgatcgagtcgttgtaccagcgcacgccgtcgagcgtgcggacgagctccatgcggtgctctacgccgccgaaagtccccgcaaccgagacgatcgtctctgccggcacgtcgccccacacggcggagatcgccgcaaggtagttctcgacgttgtgcttgccgggaatcagaatatccgattcgcgcagcacgggcgtatcgccgaaaaagatctcgccgctttcgctgcaccacgcgccgttcgtctgcgttcggcgggagaaaaagagcgtttcgccgcgcgtttccggcgcacaggccgcagtcagggcgttgtccgcgttgagcaccgtgcgcccgaacgcgttctggtgcaggaagatattcttcttcgcgttcacgtactcgtccatgtccttgtgcacgtcgaggtggttcggcgaaaggttcgttatgaccgcgacgtccgggctgcggcgcatcgagatgagctgaaagctcgagagctcgacgaccgcgacgtcctcgggcgcgatctcttcgatctccggcagcagcgggcggccgatgttgccgccgaggtggacggttttccccgccgccttcagcatctccgcgatgaccgaggttgtcgtcgtcttgccgtcgctgcccgtcacggcgtagatcttacaggggcagaggtcgaaaaagacctccatttcgcttgtcaccgccacaccgcgcgcctttgcggcctgcaattccggcagaaaatacggcacgccgggcgtgcggaacagcatatcctcgtcgatgttttcgaggtagccctcgccgcagatcagcgctgcgccgcgccccttcaaataggcgccgtcctcgccgagcgcctcggcctcgcgcttgtcgcgcacggtaaccgccgcgccgcaggcgatgaatttttcgatcaggggcaggttcgtccggccgacgccgatgaacgaaacccgcttgcccttcaaggcgctgtaaaactcgcttgctgtcattctgatgatcctttctgtatcggcttagtggaggaacgttctgtagtcctcgaggttccggcgcagcaggtcgggcgtctgcaggccgtagggacagcgcttcatgcactggccgcagtgcaggcagtcctcgatcttttccatcttctcctgccacgcgggggtgagccagtttgcggccggcgaccggcgcagcagcagcgacatgcgcgcgcactggttgatctcgatgcccgcggggcacggcatgcagtagccgcagccgcggcagaagtcgccggcgagcgatacgcgctccgcttcgatgaacgattcgagcgcctcggtcatccgcggcgggtcgtcgttgtaccgtaggaattcgtcgagctcgctctcgcgctggatgccccagatcggcagcgtgttcgggaactgcgcaaggtacgcgtaggccgcgtcgccgcgcgtgatgaggccgccggaaagcgccttcatgcagatgaagccgacgttcttttcggcgcagcgcttcacgagcgcctcgtccttttcgctcgccagatagctgaacgggaactgcagcgtctcgtacaggccggaatccaccgcctcctcggcgaccgccagccggtggtttgtgatgccgatgtggcggatcttcccctgcgccttcgcctcgagcatcgcctcatacaggccggtgccgtcgccgggcttcgggcagaacgccgggttgtggaactgatagacatcgatgtaatcggtcttgagccatgagaggctcgtctcgagatccttccagaagccctccaccgtcgtggacggcgtcttggtcgcgatatagaggtgctcgcgcacgtcggaaagcgcgaggccgatcttcatctcgctgtccgaatagctgcgggccgtgtcgaaaaaccggatgccgttctcgaacgccttgcgcagcaggcgccctgcctcctcgacggaaacgcgctgcaccggcagcgcgccgaagccgttgcggttgactgtgatgcccgtgctgccgagcgtgactgttgtcataaaaatcaccattccttatttttggtgccggtcggcgaagccgattgctgctttgctcgccgcggcaaaggcacaaatcgtgtgtgaaatagtatttttcacacgaaccacctgtccttttctctctgttttttcaggcgtaccggttcgagcgcgcctaaaaagccgattgcctgcctgtcagcggtgacgcactcgagcgcatcaccgtttcgggcgcacgccgcaccgtctgcgcagccgcacgaccaaattaaagaggaggatgcccacgccgagcgcggcaaacgcgccgcagacgaccgcgtcggtcgcgtcaaacaggccggcgctcgcgcgcttcgcgcagtaataggcggtccacatcaggctgagcaccgcgtaggtcaccgcaaagcgcccaagcagaaactttttcatcattgccccccctccgtccgtctatttcagtcctcggtgtcggccgtcatctccgcatagctcttgtaaaggccgtagtagatgccctttttctgcatgagctccttatgcgtgccggattcctcgatgcccttgtcggtcagcacaaggatcttcgtcgcatttttgatcgtcgtcaggcggtgagcgatcgtgaaggtcgtcctgcccttggcgagcttctcgagcgactgctgcacgatgcgctcgctctcgttgtcgagcgcgctcgtcgcctcgtccagaatcaggaccggcgggttcttgaggaacgcgcgcgcgatcgaaatgcgctgcttctgcccgccggagagcttcacgccgcgctcgccgacgtatgtattgtagccctcggagagcgactcgatgaattcgtgcgcgcccgccatcttcgcggcctcgataaccgcctcgcgcggcgcgccgggccgcccgtactcgatattctcgagcaccgtgccggaaaagaggtacacatcctgctgtacaaagccgatctgcgagcgcagggagttcagcgtgacgctgcggatgtccttgccgtcgatcaggatgcggcccgcggtcgtgtcgtaaaagcgcgggatcaggttgcacagcgtcgtcttgccgccgccagacggcccgaccagcgcgatattttcgccggccttcaccgtgaggttgatgtcggaaagcacctcggtgccgtcgtccatatacgtgaagcccacatggtcgaacgtcacgtcgcccctcacgtggccgatgtcctcggcgcccggctcgtcgaaaatatcgatctcggcgtccatgatctcaaagaagcgctgcacgccggtgatgccgctctggaactgctcggtgaactgcacgatgcggtggatcgagttgatcagcgtcgtgatgtagagcaggtaggcgacgagctcggacgggttgatcgcgccgttcatcatgaaaatcgcgccggcgattacgacgacgatgtacatcaggccgtcgaagaatttgttcgaggcctcaaagccgcccataaacatatagcgcaggcgcttcgtattgtagaacttgacgttgccttcctcgaatttcttttcttcgaggctctcgttcgcaaaggatttgacgacgcgcacgccgagcaggctgtcctccacctgcgcgttgatctcgccgagctgccggcgctggctcagaaactggcggcgcatcttcttgttgaaatacatcgccgcaagcagcataaacggcagcaccgcaaagatgatcagcgtcagcggcacgttcatcgtgcagaggatcgcgaacgagccgaagatcttgatcgccgcgatgaagaattcctcggggcagtggtgcgcgaactcggtcacgtcgaacaaatcggacgtgatgcgcgacatgatctgccccaccttcgtgttgtcgaaatacgcgaaggagagcttctgcaggtgggcgaaaaggtcgcggcgcatgtcggtctcgatctttgtgcccatgatatggccgatggaggccatgaaaaacgtggcgcccacatcgacgagctttaggaacatgtagagcaggccgatgcgcaggatgtactcgatcgtgagccctgcgagattgttgatgcccatatccgtgagctgctcgatgatgagcggcagcgcgagctcgcacaccgtcgtcatcgccgcgcagaagaggtcgaaaatcaagacccatttgtatttgacgaaatacggcgcaaagcggcggatcagccccttctgccgtttttgctgtgcctgttccaagaaaccccaacctttccggattccggcgcgccgcgcgcgccctatcccccacaaaatttaccgcttctattttaccacggcgctcccgcctttacaagggaaaaagccgtcatttcaagcgcaggagcgctgcgatccgctcgcccttcggcatgtggacgacctcgtcgcgcgtgatggcctttgtgaacaccgccgcgagcacatagacgaacaccgccgcggcgatcgcggcgaccacggcgatcttgccgctgacgaacatcgaaagcagcgcgtacaccgggtacgagacgccggccatgatgagcgacgcgagcagcggccgcaccgccatgccgatcacgctcggaacgcccggcagcacgcggtgcatcgcgatgacgttcagcacgatcatgacaagataggagacgaacgtcgaaaacgccgcgccgttcacattgatctccgggatgccgcagagcacgtagacgacgatgatgcgcaccacggtgccgaccgccatgttgatgacggggatatgcaccttgccgaccgcctgaatcatcgaattcgtcgtgtacagaaggctcgccgtgatgacggcgggcgccatgagcatcagaagcggggccgtgcccgccgcgtcctccggctggctgtacaggagcaggtcgcagatcggccctgcgaacacgcacaggccgaccgccgccggaatcgccaccatcagcgtcatgcgcagcgcaagcgtcgaggtctcgcgggtgccccggcggtcgttcttcgcgatcacgccggcgagcagcggcagcaccgccgtcgagatcggcacgatcaccgcgttgggcaggtcgaaatacttgcgcgcgttgccgagccagcccttcatcgccatcgccgtgccctcgtcaagccccgccgcgccctgcaggcggtacatcatcacgctggaatccacaaggtccaaaaggctcagaaacgtggagccgacgatgaccggcaccgcgaaaacgacaatgtcgcgcaggatgctcttcgtgctggaaacgggcacctcgcgcaccatatagcgcgtttgggcgcgctttttaaagtaatagaccagaatatacaggacggcgaagagcgagccgaccgaaacgccgatgatcgcgcccgccgcgccgagctccggcaggcccgtcgtcttgagcagatacagcgcgagcgcgatgccgacgaacagcttgacgacggattccaaaacctgcgagaccgccgtgggcgtcatgttcgagcggccctgaaagtagccgcgcaggcaggaggaaagcgacatgaagagcaccatcggcgccagcgccgcgatcgcgtacatcgagcggtcgccctgcgtcatcagaatcgaaaactgccttgcgaaaacgaccatcacgaggcagccggccatgccgatcacggagaacaagaggaaggagacgcggaagattttatccgcctcgcgctttctgccctgcgcgtaggccatgctgaccatgcgcgagatggcgaccggcgtaccggacgtggcgagcacgctgaaaaagatgaagatatcgtaggccgtataaaaatgccccatgccctcgccgccgaggaaattcgccagcgggatggaaaagaatatattgatgaatttgacgacgaacgtcgccgcagtcaggatcaccgtgcccttgagaaagctctgtcccttttgctccgccaaaaaaatcactcctgtaccttgttattcagcgctgcacgcgcggtatccgcccatacccaaaaccactcttaaaagaatagtataccagttttcgcgcgtttccgcaaccaaacgcggcggaaaataaaataaaaagcgtgcggcggacacccggtagccggatgcccgccgcactgaggagattaacccaaaacaaagagaatttttcgttaagctatgcctttacaggctgtagacgccctgctcggatgcgtcatcgaatttcatgccgaggtaccgcgccgcctcgcgcagcaccttcttgtaattgccgtacacgccgccgacgtggtggatatacgggccgaacatgagcttttcttcccagcgcttccagttgtcggcctcaaaccatacgtaggtgccggtcgtttcggggccgtccacccccttgccctcgccgccgaacaggtagtactcgccgtcgatgtcgtcgaagcgggagatcgtgatctcgcccttcttgagcgcccagcgctcctgcccgccgacaaggcgcgccttcgaggccgggtccttgagcgagtacgggaacggcccgcagtgccagagcagctccgcgttgtcgttttccgggtggcggatcgtcaggtccgcgaggaagcccgccgcgtcgccgagcgtgacggcgcgcaggatcgccagcgtcaccgcgccgttgaggtcggtctcgcaggagatcggcaggccggcgtcggcgagctcgccgagcgtcatgcagatcggcacgccgatgatcggcgtcgcgctccagcactccatcgcgccgacggagcagttattctcgagcatgagctgcttcgtcgccatcgcgacggcggcgcagcgcagcaccttgtccggctccatcgccgaggtgtcgatgcgtgcggtgaggtcggcgtaatacgccttgagcgccccgccgttctcggcgatcagctcgtcggcgcgctttgcgatcgcggtcggcgaaatcggcaccgtcgtgatgccgaacttcgtcgcgagctccgcctcgttcgccataacgctcataaacggcaccgggcgggagccgaacttcgcgatgcgcagcgtcttaatcgttttgatgacggagacaacgcggataaacgcgtcgtagccgtttctgaaatcctcgctctcggtctcgcagttccagatgtagctgtattttacgccgaagcggcgcatgaccttggaacatgcgaacatgccgcactgcgtgtcccggccgcggccctcgtccgtgttcgggcgctcgtcacgcgcgccccacagcagcgtcggcaccttcatctgtgccgcaacgcccgccgcgcactgctcctcgccgaaatcacagtgcggcgtgaagagcgcgtcgatattggcccggcggaacttctcgacaacggccgggatcttatccgtctggaacaaaatgccgttttcgcacaggtcgtcgatgtcgatgatctccaccttatcggggaggatcgagcggatcaccgccatgaatttatccttctggcgcttggcctcctccatgctgagaaagcctctttttgtgggcgcaacgcccagtctgaccttttccattacaactgcagcccctttccgtaaaactcggtgcgctgatcgatttccgtgtaatcgatttccccggttgccatgaatttctctgcggtcgcacggtccgggatgcccgccctgccgccgatgcgcgtgcacttgatgcaggccacggctgtggcgagctcggccgcggccttcgccgccatgccctccgccatgcctacggcgaacgcgccgtggaaaacatcgcccgcgccgacggtgtcggccacgtgcacgtcgtaggaatcgagctggaagaagccgtcggcgctgtagccaacgcagcccttcgcgccgagcgtgaacacgacgacgggcggccccatctcgaatacctttttgcagttttcctcgtagtttttgtccttgaacagcacgtcgtagacgaactcggacgcgacgaacgcgtcgatcaggtctaggttctccatgacgctcgaatcgtagctgtccgcgtcgatgatgaccttcgcgccggcggccttcgccttgcgcgccgcgtcgaggcagacctcggagccgcgagagatgaagaaccactcgcagtccgcgagcaccgcctcgtccagtgttccgggcgcgggcgccgccgccgagccgctgcggtacacgatgctgcggccgttcgtctcgcggtcgctgatgacgatcgagagcgaggtcgtttggccgggacgcacctgcatgccgtgcacatcgatgccgtggcgctcaaagtcccgcagcacaaacctgccgtaatcatcgtcgccgaccgcgccgagcatcgcgcatttcgcgccgagccgcgccgaggccaccatgccggtcgccaccttgccgccgccctgccacgaaaggtcgcgcacgcccgtgccgccgttcggcttcgggaatacgtccacattgaccgcgagatcgacgcagggcatgtcgtatccggcaatctgatatttcttttccactttcaaactcctcccaattttccgcttcacagagagaagccgttgggattcaaaaggcgcatcttgccgcggacgaactcgatcgcgccctcgctcgcctcgttcaaaatcgacatgaagctgccgtccttgttttccgggtccgccgccgcgcagagcgaggcgtagcacgcgcggaaatactcggtcgcaatgttgaacttgctcatgccgaggcgcacgctttcctgaagctgctcgtgcgggatatcggagcagccgtgcagcacgagcggcaccggcagcgcagcgcgcagctttttgatgcggtcgaaatcgaggttcggcgtctggacatacgcgccgtgcgcgttgccgaccgcgacggccagcgagccgcagcccgttttttcgacgaactcgaccgcctgctcgacgtttgtgtaattgtcgctgttgacgatgtcgtcgaggctcgcgccggagccgacatggccgagctcggcctccacgtccacatcgaacacggacgccgtctgcacgacggccttcgtcatctcgacgttttccgcgtacggccgcgcggagccgtccaccatgacggacgggaagccggccttgatgccgcgcacggcgatttcatacgaggccgagtggtcgagatgcacggcgatcggcacgtccgcattctcggcgaactcctttgcgaacgccgcaacgtgatgcaggctgatgtaggactcaaaacccggatacagctgaatgatcagcggaatgcgctcgcgcttcgccgcttccgccgcccacttcacggtctcatagttgaacacgttgatcgcggcgacgccgtaatggttttccgtggcgtgctgcagaatgtccttgaccttcatgagtgccattgttgttacaactccttctggaaattcaggcagcgcgccctccccaagggatgaaacccggccccgagcgccccgcgcagcggaacacgcccatgtacaataagtcgctatgatccaaacgctttggaggccggctccccagccggcttaaaaaccgcttatgtacatgcgtatgtaccggaaaagtccctgcgtcttacggactatggcgcgaaatcttccatccaaaatcgcacgctgttcctgttgcctacaatatatcatgcaaaccgtccagtgtgaatggataaaagtgattttattttgacaatctcgacctcgcccgaaaataaaatcgcggtgcattttgagccgccgaaacacaagttgatagagaaactttcctaaaaaacgcgtaaaaaaaagcgctccgtccggttttccgggcgaaacgcatcttatttttagtggggcgggcgctgccgcagggggcaggaccgcagctgcgggaaggcggtgcgcggcggcatgacgacatcgaaaactgccgcctgcgcgctcccgcgcggcgatcacttggggcctctgccgcggccttcggtcagcagagcacgaactcgtggagcctcgtgcgccggatggcgagcatcagcggaatgccgagcgcatagcagacgacgagctcgccgacgccgaccgaaaccgcacccgcggcaaagccggcgagcgaggcgtttccgaagccgaacacgcccgcatcggagaggcacgagacctcgaagccgacgatcagcgcgttgaagatcacgggcggcagcggcgcgagcaccgggatctccttccagcggatatgccgcagcatgtaggtgcaggaggctgcgagcagcgtcgcgagcgtgccgaacacccagtccacaataccgagcggactcatgaggttcgagatcaggcagcctacggcaaggccggggatcgccgccggcgtgaaggccggcagcacggtgagcgcctccgagaaacggaactggaacgggccgtaggcgaggttcatcgccgccgctgcgtaggtaagcacagcgtacagcgccgcaatcacggcgctgagcgccagaaagcggactttgcttgcagttttcaaatggatacattcctttcggaccgcggtccggcaaaaccggccgcgctagttttatttaaggtcaggatgtcgcgactgaccgcggcagcaaatttgccgcagcttatagcatacgcatttcggcgcaaaatgtcaagcccgcgcgcagaaaagcgcgcattctgccgaagctgcgccggggactggacagcgcgcgccgcatgtgctatgataaaccatattttctgaaaaggcggtgccgcttatgaaacaggggctttcccgggatgattccctcgctgtaaagggaatcgccgttttaatgctgctcttccaccatctctactgctccaccggccggttcgacggctacgctgtcagcttctttcccttttcggaggaaagcatcgtcgagctcgctttgctgttcaaaaactgcgtgagcattttcgcgtttatttcgggctacggcctgctgaaatccatcgccgctgtgccgcccggccggcgcgccgttttcgcttggaacgccgcgcggctcatccggctgctctcgggcttctggttcgcgtatgccgcggcctttctcgtcacgctctgcctgagcgggctgccgcttgaaacgtatttcggcggctcgcgcgtcgcgggcttcttctacatgctgaacgacttcttcggccttgccgggctctttgaaacgccgacgatgaactcgacgtggtggtacatgagcgccgccgtcgtctacgtgctcctcgtgccgctgatctaccccgtcgtgcggaaagtcggctacctgccggtgctctccgttgccgcggcgcttccgcgcctgctgaacagcggctatcccggcggcaaggacccctactcgttcctgctgccgttcctcttcggcatgctgttcgccgattacgacctgttcggccgaatcgagcgccgcttcccggccgactgcccgcgccgctatgcgctgcacttcctcctctggggcgggctgatcgccctctcctactccgtctcgcgcaactatgggcacaccgaggcgtgggagctgaacctcggcgtgctgccgctcgcctacctctgcttcttccgcttctgcctgatccgcctacccggcctgcggcaggttctgctgttcctcggccggcactcaatgacggtctttctgacgcacaccttcatccaattcacctatttgcaggacctcatctacgcctccgggcatttcgtcctgaatttcttcgtgcttttcgcgctctcgctcgtgctcgcgcttctgctcgacgcgctgcgcgggctctgccgatacgaccgcctgaccgaagcgctgatccgccgcatcaccgggcggtgcgcggcaaagcagacttaaacagcacggcgccggctgctgattttgcagccggcgccgtttttggttttatacgggttatgcctgcgcgccgtaatcggcgcccgcggggttgcagagcaggaggaccgttctgtcctgcggctcaagcgtgatttcccccgcgctgtacgggatgaaaaattcatccgccttttgaaccggcatcgccgcttccccgcagcgcagcgtgccgccgccctcgagcacgaccgcgatctgcggcgtgccggtgcgctttaacgcgaccggcttttcagccgtgagctgcgtgaacgagaagtacggcgtctgcgctgtgccgatcacgacgcgctcctcgccccagtcgccgccccgcagccgcttcggctcgatgcggtagcggcgaaggttctccgcgtagtccgcgccgttgtagatgtagcagccgagcaggcgctccttgtggaaggcctgctcctcgggcgtgccgtccggaagcttgtgcgcgccgaccgtgatgtcgctcggctcctgcacctcggcgacgaagcagccgcagccgatcgcgtgcggcaggccagcctgaatgaaaaacgcatcgccgacctccaccgggatcttgtggcagcagtcctccatggcgcggatgtcgccgcggtcgaaggccgcttcaaacatttcgcgcgtcacgcccgccttaaagcccatgtagacgtagggcgtttcggggctgtcctcacgcttaccgatgacgtaccagctctcctccttgccgtaatcgctcccgaaccattcctttgcgtaggcgcgcgtcgggtgcgtttgcaggccgagctgcttttctgcgtcgagcagcttcacgagcacgccgacgcgcgcgccgttgcgggcgatatgcgccgcgccgagcgccgcctccgggtcggcctccaccgcctcgaaaaggtagcgccgcgagccgtcgggcagcatgacttcagcgcatccgtcgttcgggtcgcccttttcggcggcgtccacagtgcgcgtgtcggagccgacccacgcctcgggccggccgtcgtcggcgcccggaaagatcccgcggaagcggtcgatctcccgcccgccggggtagcgcacgatcttgttcggcacgagcttccacggcaccgtgtaccaattcttttcaaacaacgccatagcttcaccaaatcctatccatccgcgccgctcggtgcggcgcagatccggcgcgcggagcttttctttccgcgctgttccccaaaatgcgtgtcgttcgttacacgcgcggctggttcgggcacatcggcggcccgttcttctcgaatttcgaatccacatgcgcgccgccctcgttcaagaggacgaacggcacgtgatagatgcgcccgcgcttcgaatcctcgaaggtgatttcgagcacgccgcggtacagcgggcgcgccgcctgctcgaggctgagctcaaactccacggccgagatgccggagcccatgtgccccattgtcacaagcgtgctcagcgttttgccgggcagcacctgcatttcatccgccgtgtagaggtgcaggttcagccgctcggtcgaaacgcttttcgccgtgttcgagatcaaaaaacggatgcgcttcggctcaccggcgcggatcaccgggtcgcccatatagtcgagccgcacgttgatgtaatcgaagcggtaggtcacgacgcgcatgtcgtcgtagatattcgtgaaccacgcgggggccgtgaagtccttcgcaggcccgtcgagccggaatttccgcgccgcctccgcatggagcctttcgatacgcgcggagaactcgtagatgtccttcgggatgcggctctccatgcggaacgggtcgatgctgatcgtcttgatcttcgtgccgatcggctcgatccatttctgatcgatcgaatcgatgccgcagcgaatgccgtgcagcgcggcgattgtgccggccgtgcagtccgtatcctcgccgaaccagaccgcatcgcacatcgatttttcgaggtcgccccgcccggcaatcaaattataggcgatgatgaacatgttcgagggcacatcgaagccgaaggggccttctccgtagccctttttctcatcctcgggcgacatgtaatgccactcgatgtggccgatgtagtgctgcatcatgtactcgcgcgcggtctccttcgaaacgccgcggcgggcgaaatcgacgccgtcgcggatcgcgcgggccacggcgcagtctgccgggatgtaactcaggccgatctcgaccagccgctcgagcgacggctcaaaaaacgctgcgctttcgagcgccgcgaaaaacacctccgcataaacgccctcgccgtcgccgtggtcgaccatcgcgtcctcaaacgcatacttcgcggcgagcgccgggtgccccgggaacaggcaggcccagatctcgctgcggatgaacgagccgcagctgtgcttgaaatcgttcttgtagatgcccgaatacggcggctcaagccccacgcgcaggttggcctttgccgtgccgtactcggcgtgagtgaagatcatcagctcgttgaagtagcggccgagcacctttgcgtcgaggtccagcccgttgtcctcaagcgcgaggagccagagcacctgaatgtcgaggtcgtcgttcggcagcggctcgccgctgatgtcgtgcgtgtaataggaaacgtcgttcgtcgcgcggttccactccatcggcatgccgagcgtgccgccgatgttcttgccgatccagcagccctccacgcggcgccggtattcctcgggggtcatttgcatggttttgtctcctttccacagtgcgggcacgcgggtatttccgcgcggccgcccgccgcaggtcccgcacaggggcggggaatatttttgtcagggcggcacgcgcccctgtttccgacggcgcagggcttcgccccgcccgccggtcagaaccaagaatccgtatagcccgccttcttcgcctcctcgctcggcgtcgtctccgcgacgcgcagcacgggcatttcggcacagctttcgacgcgcaccgtctttttctcgttcgggtacagcgtgaaatagttgtcgctgtaatggacgcggtcgtcgctcgtcgtcaggtaggcaaacggcgtgtagacgtccgccgaaaccgtgacgagcaggtcgccgccgtcccgctcgaccgattcgatcttcgcgcggctctccgggaacgtgtagtcgcggtagtaggcgcgcaggctgtccgccgtgtcgaaaccctcggcccgcgcgaaaaagaagccctttttcaggtcgcccgcaagcggcaggctgagctgctgccacgagtgcggcgcagcctcgaccgtctttgtgcagaggccctcggtctttccgtcaaacgtcatgtagccgcaggtgatctccgccgcgaccggctcggccgtctcgttgatgacggtcacgcacgcgccgttttccgccgcgcggacgatcagcttcttcggctggaacgcgcgctttaggaagtagaacgaaatcttgcgcgtcaggtagtagtcgatgatcgtccagcccgtctccggccagcagtcgttgtacatccagatcaggtcgcccgcgccgtagggctttctgcgcatcgcctcggccagctccgcgtagagcaggccctgcatgatgccgctgtacaataggtagcccggcacgtcgagcttcgagaaatcggtgatgtggcggtcgatcgcgccgtcgatgttgccgcgcttgcgctcgaattcgccgtggtgcttccagatttcaccgtcaaagcgcatttcctcgccgtcgtggtagcggcgcacggtgctctccatctgcgcgccgaagaagccgtattcgctcgagaagcgcgccggcatgcggtcgaacgcctcgagctcgtagacaaacttaaacttcgtcttggggtcgcggccgaagtacgaccacgcgtgcacgtcgccctcctcggtgaggttcgcccgctcgccgaagtacggcgaggaaggcatatacggcaccgtcgggctgttgcggtgcacggcgcgcggctggatataattgaaaatcttctcgccgtagaagcggtccggcgcgaccggcgccgggaaccagtcgctgtaggactcggcgatctcgttgttgccggtccacaccgccatgcaggggtagtgcgcgaggcgcttcgtctggtactcggcctcgcgctccgcctcaaagaggaacgaatcgaggtggtccgggtagaagccgcaggcgtacatgaagtcgtgcatcaaaaggatgccgtattccgagcaatactcgtagaagcactctggctcgtacgtgccgccgccccacatgcggaacatcgtgaaatgcgccgccgcgccctcgcggacaagcgtcttgtacgtcgaatccggcgtgcgcaggtaaagcgaatcggtcggcacccagttgccgcccttgcagaagatacgcgtgccgttcactttgaagaagaaattgcgcgtgccgtcctcgagcttcgaggtgtcgagctccaccgtgcggatgccgatgcgcttctccggcatctcgtgcgtgatgccgcgcgcggtgcaccgcgccgtaaaggtgtagaggttctgcgcgccgtagccgttcggccaccagagctgcgcgtttttcagcgtcacgcgctcggaaacgtagttgacgccgccgacgagcatcttcgtctgccgcccggtgcagaccgtctcgccaccgattgagagcgcatactcgatctctgcctcggcgctctgcaccatgttggatttctcgatctcaaggttaaactcgatctccgcgtcgctgccctcgagcttcagcgtatcgacgcgcgccgccgcgacttttgcgccgctgaacgcctcaatgccgatgctgcggccgatgccgcaggtaggcacgggctggcaccagtcccagccgtaggtgaactgcggcttgcgggtgtagacgcgctggtcgcacagcgcgttgtcgctcgcgcagtagtaggcgacgctgtctttcgggtagtgcagctccatgcccgaggtcaggcggatgacaagccggttttcgccggcctgcaaaaagcgcttgacgtcctcggaaaacgcgcagaacgcgttttcgtggtgcgcgacgcgcatgccgttcaaaaggatatcggcgttgaaatcgagcatctcgatattcaggcggacgatgtcctcctcgagcacggcctccgatacctcgaaatccttgacgagccaccacgagaggtcgcggatccacaggttctttttcgtgttcgtcttgaggaacggctcctcgacgatgccggcgtccacgagcgcgctcgtcacgtcgcccggcacctgcatcggaatccagccgcttttcgacgggaacgcgttcggcccgcggtcgttgtacaccgtgaacgcgcggctcgggccggcgcgaaactgcgcctgcgcctcctcgggcagatcctcgagcgtcaaaaagccgggcagcgtcggcgccaccgggtcggcgtccagtttgcgcagcacctcggtgaagcggtccgctgtcacgtccagaaattcgccgcggagcttccattcgccggcaagtgaaattgcatacatagtaaaagtatccatcctttctgaatgcgggcggattcagcccgtgcacacgcgtgcatgccgtgccgaaccgcccgtgcgcgcgaaagcaaattttccgcgcacactcctccgaaatggggaaaaccggcacagccgcctttccccgtacctgcattctagcgaagccgggagcaaaatgcaagcgctttcacagcttttgccttgagaaaaaagtgaaaaactcttggccattatcacgaagcgggcggggaaaaaaccgtgcgcggagaaagggcaaggctctgcacaaaaaacaaaatggaggaaggcaccgggccttcccccacttgttatttactcaaagctaaccgagatgcagtgcgcagcattattcagcggcgctgctctcctcggaagccgcagagctctccgcagaggactctgcgctcgcctcggaggaggactccgcagcagaggactcaacatccgcttccgcgatctcgtccgcatgctcggcgaggtaagcctccatggccgccgtctgcgtagcatagagctcctgcgcttccgtcgtgcactgctcgaggccgaggccgttcagcgtggcgatgtagttgtcccagccagcttccgtgtcattcgtaccggcaataacgccccacatgtactgatccttctggtcggcgatgtcggtgcccatatcgagccaagacgtgaaggcgttcgggtccttccactcgacgagctgattgtatctgtcgcggctctcttcgccggacttgttgaacagcgcggtcgtctccggcgtgttgctgatgttgcactcgtccttgcggttgacgcagttgtagaacagcttgaggccgatgccctgcgccatgttctcatcgccgtccggattgacgatcgcgacaaagctgccgtcgtcttcatacttgtagtgctcgccctcgtcaccgttcattctgcggatataattgtccgaagcagtcatatcgtcccagatcgcatacagtctctccgggttctcgcagtccttcgtgatgccgaaataagcccacgccgcggaggttgccgggtcttcctgcgggttgccgttctcgcccttcaccatgtcgatcgggacccacttggcatccgggttggaggaatagaaggagatcatcgtctgtgcgctcgggttgttccaagcgacccagctgtaggtaataccgaagccgccgttcgccatttcctcgtcgcggttcgtatcctgcgtgatgttctgggtgatgtagcccttctgatagagctcagcaacatcggtcagccactttctggtgccctcggttgccgggccgtactgcacgttgccgctctcatcgacaacccacttttcgtagtgcgtgtaatcataggactggatccacggccagaaggaacggaagtcgtagccgtcgccgccgaggccgtaggtgtcgttcttgccgttgccgtccgggtcatcctcggtaaacgcgcgcatgacctcttcaagctcatcgatcgtggtcggaacctcaaggccgaggttgtcgagccagtcctgacggatccagagaacctcgcaggagggctctgcaacgtcgcccgggattctgtagatcgcgccggaatcatcggccgcgaagaacagcgtgttcgggtccatcttgttgtagtagtcgcggatgttcgtgtacttgtccatgtacggcgcaacgtcaacgagcaggccagcattgacccactgctgatactgcgtgtccatgctccaccaccagatggtatccggcagatcgtcggaagccatgatgagctggatctgggaagcaccgtccgtatagcccgggaggacgttcagcgtaatgttcacgttgtacatctcctcgagccacttctcgatttcgctgtccgcctgcttgtaaccatccatgaccgtgagggtcaggtccatggtttcagactggttcaggacatcgatcggctcgccggaatcagccggctcaccgtcgccgctcgtcgaacccgtgctggaattattcgacgcagtggagtttccgccgttgccgccgcacgctgcaaacaggctaacacacagagccagcgcgaggacaaggcagatgattttcttcatgttcatgatgaaaattcctttccttttcttataatttgattgtatgtattccgaggcggtcgcccgccccgggacaatcacatctcaaaaaatggccgcgggcaggaatcagcccttgacgccgccgatcatgacgcccgtcacgaaatacttctggacgaacggataaacgacaaggatcggcaccgtcgaaatcacgatcgtaccggccttgatggtctcggagttcgtgttcgaggtattgatgacgttgacgccggcctgcgccatcgcctgctgcgtattcgtcagcatgttgcgcagcaccgcctgcaacgcccatttgtcgctggaacggatgtacagaaccgtggagaagtagtcgttccaatatgcaacggccatgaacagcgcgatcgtcgcgattgtcgctttagaaagcggaacgatgatcgagaagaaaatgcggatatcgttcgcgccgtcgattctcgcggattcctcaaggctctccgggatggagaggaagaagttcttcatgatgatgcagttgtacgcgctcacgagcgccgggagaatcagcgcgaggcggttatcaagcaggccaagcccctgcacgagcaggaagcttggaatcatgccggctgcaaaaatcatcgtgaacaggacaaggaccatcatgaccttgccgccgcgcaggcgggccttcgaaagcgggtaagccgtcatcgcggtgagcagcgtgcccaaaaccgtaccaacgatcgtgaccatgaacgaagtgccaaagcccgtgaaaacctgcgggttattgaaaacggatttgtatgtatcgatattgaagcccttcgggtagaggaacatgccgcccttgagcgtctcctccatcgagctgaacgactgcatgacgacatgccagaacggataaagcatgacgaggcagagcacggtgataaaggtgtagttgaatacggtaaaaatcttctcacctgtggaggttctgattttattcgtatgtgccattttcattccctccttaccagatgccttcgttgccggtctttttggcaacggtattgacaatcaggatcatgacgaacgcgatgacggatttgaacaggccggccgccgtggagaacgagtagtccgcgttcttgataccgattctgtaaacgtaggtatcgatgatatccgccacgctgtaaaccagcgcagaatagagcatgaagatctgatcgaagcctgcgttcacgatattgttgcagctgaggatcagcatgacaacaatcgtcggggtgatggagggcagcgtgatgtgcagaagctgcttccacttgcgcgcgccgtcgatctccgccgcctcgtaaagctgcgggtcaatgccggagagcgccgcgaagtaaattatcgtgccccagcccgcgcccttgtaaatatccgtgacgatcagcatcggcacgaagtagcgcgtatcggtgagcacctgaatctgctcgccggaaatcgaattgatgatgctggtgacaaggccggtgtccgggtcgagcatgttcatgatcaggccggagagaacaacccaggaaatgaagttcggcaggtacagaagcgtctgcgaaaccttcttaaacttcatgttcttcatttcgttcatcatcagcgcgaggatgatcgggatcgggaagccgcacaccatcttcagaatcgagatgtaaagcgtgtttccgaacacctgcaaaaactgcggtctcgtcaacagatcgacaaagtgatcaaaaccgacccacgtgcttgccgccgtatcatacggattgtaatccatgaacgcgatcacgttgccgaaaatagggatgtaccggaaaataatcaggaaaatcatgccggggagaagcagaagatatagccacttatcgcggacaacatctttacgaaaccgctcccaagcgctcagctcatgtgccggcttggctgctgctaccataagtctacctcctagaattttgtaaaaccgattccacaggcccacagcgcgaagccccggcagcatcccttgtattcgtctctctgacgaatacaaaaaacagggtaccctgttttgcggaaaagctgctgaaaacggcccgagccgcgcaaccgcccatactgcatcgaaacgcaccgcggcccttacataaaagccccagcgcatctcacaaaaaacacagcattccgtttggtttatgtcgtaattttatcacccgtttttgtgaatgtcaacaacaaaaattcgtgcagattggctttttttgcaaatttcacacatgttgcattctattatgctaaaccgaaaaatcaataaaacgcacctaatccaatacaagtttttgctgaaattccgttcttttttctctatactgtgcagaaaaatttgcagccctgcgcgcgcacgcgtcaaatcaaacgcgttcaaatcggccttccagcgcctttttttatgggacttttgtccggttttgcaggaatgtggaaccggttccccattttttcatgccactgttttccgcattttggtattgcggcattataaatacaactttcctgtatttttaaaattgttaaattttatatgtaattcaatcaattatgaacagaggcaaaacgcacaaaaataaaagtttacaattttgtaacctattgttaacgagacaaaaactgccccctttggttgtgcattctcgctaaccggcgccgcgcatttggcttattctctgtttacccacccaactcatttggagatatatcctaaaaagttttgtatcggtttaaagccacaaagacatttctccggtttttcggcgcaaaaaagtgtacagaccgcggctggggcttgcaatgcgcgcaaaaacgccttatacttgccctataccatataaaaggaacaaaggagacgatgccatgatgaaccgagcagaatttgaccggcaggccgaggcccatcgcgcgctgcatattctggccgtgcgggacggcgaggccgtgttccgcgccgactacgacgaggagattcggcgaaaccagtattccgccacaaagagctttacgagcgccgccgtcggcatcgccgcgggcgaggggctgctccggctcgacgagcggctgaccgacgcctttgcggacgacctgccgccgcatgtcagtgagaacctcgcgcgcgccacggtgcgcgacctgctgaccatgtgcctcgggcaggacagcggctttctgatgggcggccagcgcccgttcctgcgcgagcgggactgggtgcgctacagcctcgcgcagccgtttccccacgcgccggggacaaaattccagtacaacaacgtgggtccgtacctcgccggcgtgctcgtgcagcgccgcgcgggctgcacgctcgataaatacctgacgccgcgcctgttcgagccgctcggcatcacagccccgacgtgggaaaccgacccgctcggctattccttcggcgcgggcggcctgttcctctgcgtttcggagcttctgcgcttcggcgagctgcttctcgccggcggaaaatggaacgggcggcagcttctcccggccgaatacgtcgccgaggcctcggccaagcaggttgaaaacggcgcggagggctacggctatctcttctggcgcggcgcgcacaattcgttccgcgccgacggcaaatacggccagttcgcgatcgtcctgcccgacgacaacgccgtcatcgccgtcaacgcggaaagccgcgagcggaaccgcctgctcgccttcctgctcgaaaacaaggcgctgctcctcggcggtatgtaattcttctgcaatgtgcactgtatttcgccccgcactgtaaagtacgtttcctttacgcaagtgcttcggctgtgcacgccgcgcatgcggccctttcgattcgccaaagccgacgcgccgccccggttttccgcatgccggccgcgcccccgaagccaccgggggcgcaaattttttccgtgcggcagcgccttgtccgcttgacgtttaccgctgcgcgttatacaatagatacagaatgcggggcgcgctcaggtgcagagctggacgccgtccgaatcctcgcggcgcaaagcgatcaccgcgccgcggatcagataggccgccgggtcgcccagcgggctcacaccgacgcactccacgcgggtgccggagatcagcccgatatcctgtaagcgccggcgcatcgcgccctgcgtctcgatggcgcgcaccacggcgctctgcccgcaccgcagtgaggagagcgcccgctgcttttccgtttgttccataaacatgtcccccttttctctgctctcagtgtatgcgggcgggctgcttttggtgcaccggcgcgggcgcggcgccccgaaaatttcagttatcagaaaggttgattccaatggcaatgaaagtcggcattcagctctattccgtgcgcgacgaaatgaaaaaggacccgatcagcgcgatccgtcaggtcgctgaaatcggctacaagaacctcgagttcgcgagctccagcgcagacaccgacccgggcgtcggcttcggcgtggacgcggacacgatggcaaagctgctcgaggagaccggcgcaaagatggtcagcggccacatccgcccgatcgacgagaacacgatcggcgcgatcatcgaataccacgagaagatcggcacgaagtacctcggtcagtccgccgatttctacacgagctacgaccacctgatggagcgctgcgcctattacaactgggtcggcgagaagctcgcggcgcacggcatgcagttcctcatccacaaccactaccacgagttccagaagctgaacggcaaggagatcctgtaccacatcatggacaacacggacccgagatacgtcagctttgagctcgataccttctgggcgatgcgcggcggcatggacccggtcgaggttatgaagcgcctcggctcccgcctgaagctcgtccaccagaaggatttctccaagacctccgcgtcgccgatcaacctttggacggtcaagaacccggagacgctgatcacccgtgacaccttcggcgaaggcatggacccgaaggatttctgcgagatcggcaccggcatcatggacatccagtcgatcatcgacacggcgaatgcgctcggcgcggagtacatcgtcctcgagcaggatcacacgcagctcacccagatggagagcgtgcgcatcagcatggacagcttcaagaagttctccggtctcgactggtaacgcccatcgcgttttccgcaaaaacacccgccgcgcgctgctttcggctgcgggcgccatatcccagacaaaaagccgcaggcctttacaggtctgcggcttttctcttttcctgcccttatgcgtcgaatcgcggctcgtcctccccgccgggcagcacgtgcagcacgtcctcgagcccgcagcgccggcagacgtccgtgagccccgaaaggatctcatcgcgcgggaaattccgcgcttcaagctccgcatccggcagcgcgttcagcgcgctgtagaagcggagcgctgccgccagcccgtcccggtcgtccgggtcaaggcgctcgtaaagcagatcctccgccgcacacagctcgcccgcgcggaccatggccagcagcgtttccgtaagttccgcgcctgatgcaccgcttttttgctgcaaaacaacatccgcccggcgcgccggcgttttccggaacagcacgcgcgccagcgtctccgcgatgatctcaatttggcgcatcagccagtcctgatggtacatgcgctcgcctccctgcattctgcttccagtatagcaggatgcggcgcaggcgtcaatcccccccgtactgctcgtcgaggtcgttttcgagcgcgatgcgcagcagccggttgtacttcgccgtgcggtcgctgcggcacggcgcgcccgacttgatgaacccggcattcacggcgacggcgaggtcggcgatcgtcgtgtcctcggtctcgccggagcggtgggaaaggatcgttttcatgccgctgccgcgtgcgagctcgatggccgtcagcgtctcggtcagcgtgccgatctggttcggcttgacgagcagcgcgttcgccgcgcgtcgctcgataccctcgcggatgcgcgcggggttcgtgacgaacaggtcgtcgccgaccagcatcgtctttttgccgatgcgctcggtcagcgtcgtccacgccgggaaatcctcctcgccgagcggatcctcgaccgagcggatcgggtacttctcgcagagtttttcccaatagccgatgagctgcgccgaagaatagcgcgtgccgcgctttggcagcaggtagccgtcctgcgccgcccactcgctcgaggcggcgtccagcgcgatctggatctcgtcggtcgtgtagcccgcggcgtcgatcgcctcgaggatcacctcgatggccgcctcgtcgctcgcgagatccggcgcaaagccgccctcatcgccgacagcgaccgaaagcgagcggcttttcaggatgccgccgagcgcgtggtagacctcggcgcccatgcgcacggcgtcggaaaaccgcttcgcgccgaccggcatgatcataaactcctgtatgtcgatgttgttcgacgcgtgcgcgccgccgttgaggatattcatcatcggcacaggcattttgcgggcgttcgcgccgccgagaaagcggaacagcggctggcggtagtgcgccgcgagcgcttttgcggccgcgagcgacacggccagcatcgcgtttgcgccgagtttctccttgtttttcgtgttgtcgagctcgatcagaatgcggtccacctcctgaaccgtcacccgcgggatgtgctcgagcaccggggcgatcgtctccgaaacgcccgcgaccgccttctgcacgcccttgccgccgtagcgctttttatcgccgtcgcgcttctcgtgcgcctcaaacttgccggtcgaggcgccggatggcgcgttcgccacgccgaccgagccgtcgctgagcaccacggtcgcgctcacggtcggcgtgccgcgggaatcgagcacctccgccgcaaaaaccttctgaattttcataagcctcacccttcctgcatcttttgaaaatagtctgcgcatttcggaaagggtttataccaaataaaaggaggaccgcccgccgctttccgcagggacgatcctctttcgattgcagtttaattttataccacttacacaaagttcgacgggttcacgcggtcgccgttctggtacacctcaaagtgcaggtggttgccggtggaattaccggtggagcccgcatacccaataacctgtcccttctgcacgtattcgccggccgataccgcaagcgagctgcaatgcgcgtagcgcgtggaatacgtgtcgttgtgccaaatcagcacgttattgccccaagaccagtggtactcggccgagatgacctgaccggattccgaagcgtagatcggcgtaccgtaggggatgccgatgtcgaggcccctgtggccgttgttgccgtaatactgcgtgatgctctcgtaaccgtagccggcgagcggccagctgaacgaaaggctgccggtattcaaaacgctgctgtcgttgttcgagccggagccggacgagccgccgctctggttctgctggttctgcagcgcctgctggcgctcctcttcctcgcgggccgcctgctcgctgcgctggtcgatcagcgtctcaagctgcgagaggtattcggcgctctcggcctcattctccgcgatcaggtcctctgcctcagcgctctggatctgcagttcctcgatcagccgggcgttttcctcctccattacctgaagatccgcctgcttgctctcaagatccttcttctggtcggcgagttcctccttctgaaccttcagctcgtcgcgctgctcctgcgtgaggagcatgtattccttaatctgttccatcagctgcttatcgtggcgggtgacactctccatcgcctcggagcggatcgaaaagtcgtacaggctcgtggaatcgagcagaatctgcaaagtcgtaagatcgccaccggccttatagagcgcgctcaggcgcaccttgagctgctcgagcgtgtcggcatattcagcgtcggccttttcgatttcatcctccagcgcgctgatgctgtcgttcagctcgtcgatacgcgcgcgggcgaggtcgatgctctcctgataattctggatctgctcgacaagcgtcgcctgatacgcttcggcgtccaccgtttcggagcgcagcgcgtcgagccgcgcgttcagctccgccgcctcggcttcgttttgctcctgcttcgccttgacctcactgatctgcgcgtcgtattcgcttgtcgtcgtcgcaaaaacattcgtggaaaccagcagtgtcaaagccagtataccggaaataatgcgcatgttccttttcttcatatgcaaaactccataactgcaccgcgcaaagccgcgggcttttttgttctgcaatataatatattacaaaccagtaactttttcaagccttttttgaaataaatttgtaattatcttttacaaaagcaaaaacactcacacttcccacaaggacccggctattctttcttcgattttcagcaaatccgtcatactcccgatacactgcaccgcatctgcatccgcaagccccggcgccccgctgtaatcggcgccgaacacctcgagcgccggaaaaagctcccgcagggggaacagcacgaacgcgcgcgacgggatgccggggtgcggcagcgtcagctccttctccgcgcaggccgcgccctcgtacaggagcaggtcgaggtcgatcgtgcgcgcgccgtggtaggtgcggcgcacgcgcccgagcgccgcctctatgccgaggcacgcgccaagcaaggcgcgcggcgaaagccccgtttcgagtaaaacgcagatattccagtaatcctgctgctcgtcgggcacgtcgaacggcgcggtctgccagacggaggagacgcgcgccaccgccgtttccggcagccggccaagcgcttcgaccgccgccgcaaggttcctgccccggtcgccgagattcgtgccgaggccgagcaccgcgcggctcatgcgcgccgcctcgtcatctcgaccgagacgtaatcgaataccgcgttgatcggcgcctcgggctttttcagctcgagcgtgaccgcctccacctgcgggaagccggcgagcacggcgtcgcacaccacctgcgccgcgcgctcgatcaggtcgtacttctgcgccgtgaacgccgcgttgacggccttgcgcaccgcggcgtaattgaccgtatccttgagatcgtcactctgcgccgcgcgggtgagatccgccgaaagcgcgaggtcgagcacaaatttctgcccgttttccttttcctcgggatttacgccgtgataggcgaagatttcaagccccttgatccgtatcgtttccatatccgtctgtcctttccgccgggcgccgtgccccgcctctctatcgcctgtatcggcggacagcgtccgccatgcgcgccgcctgcaccgcctcgcgcgtgtcgtgcgcgcgcaccatatccgcgccgaaaaccgccgcggccgtgtgcgccgcgaccgtgcccgccacgcgctcagccgccgggccctcgccgcataccgcggcgatcacgcgcttgcgcgaggccgccatcaaaagcgccgcgcccgcggcgcgcagcgcgtccgggttcgcaatcagctcgaggttttcggcgtgcgttttgccgaagccaacgcccgggtcaaagcacagccggcgccgctccacaccgtattgtgcggcctctgcggccttcccctcgaaaaacgcgcgcaccgtctccaaaatatcgcgccggccgcccgagaggtcgtccgggtcgccggggtgcatgacgacgcagccgcagtccgtgccctgcacggcgcgccacatttcggcggaaaagccggtcacatcgttgatgatatgcgcgccggcccgcagcgctttttcggcaaccgcggggtaaaacgtatcgatcgaaacggcaagctgcgtctccgccgcgaccgcctgcacgacggccccgatgcggccccactccgcctccggcgaaatccgcgtgctgcccgggcgcgtcgactgcccgccgatgtcgatgatgtcgacgccctgcgcctccatctcccgcgcgcggcgcaccgcggccgccgggtcgagatagagcccgccgtccgaaaacgagtcgggcgtcacgttcaaaatgcccattacatacgtcctgttcagcgggaagcgcttccccgccgcgaaaaattcttccatattcactcccccgctcatttcgagagcagcagcataacctcgttgcgtgttttcgcctccgagcgcatgcagccgcgcagcgcggaggtcttggtcagcgcgccggccgcacgggcgccgcgcatcgtcatgcacaggtgctcggcctcgatgaacacggccacgccgcgcggcgcgaggttttcctcgatgaaatcggcgacctgcgcggtcaggcgctcctgcacctgcgggcggcgcgcgaagcagtccacaatgcgggcgaacttcgaaagcccgatgatccgcccgtcctttgggatatacgcgatgtgacacttgccgatgaacggcagcaagtggtgctcgcacacggaatagagcgggatgtcgcgcacgagcaccagctcgtcgtggccgcccgcgtcaaaaaatttcaggtgctgtttcgggtccgcgtgcaggcccgagaagatctccgcatacatgcgcgcgacgcgcgacggcgtttccaaaagcccctcgcgctccgggtcctcgccgaccgcgagcaagatctcccgcacggcccgttcgattctttccaaatccattgtatccgcttcctttccggacgaatctgtaatctgctgaaagcaaggctattgtatcacaatccggcggaaaaggaaacgcatccggcacaaatctttgcagcgtccgcaattttccgggatttgccgcgcctttttcgccctgcgccggccttaacgccaaaaccgcgcagggtctttcggcccataaaaataaggctgccccgagcaaacagccttatttttcacaggaacggggtgccctttccgcatgaatcattcactttgtctgcggcagcaggagagattcctgcttgccggaaacgccccaatcccttgcacaaactgggatttatcttttatacacaacctcaaattcttcacaaaccactttcatatccgaagtaaatttcagatccacttcctctaagcattctgtgaaaaacttttcatgcaccttcctccaaaatgctaaggacttatcgccttcaccttccttatatgcgtgttccgcggttaccgcatgaaacggcacgacatataccttcttcgtctgaataatacaaaccgcttcatctttagaattttactttacatcatacgctccggctttgggcagcggctcattttctaactcgtataacggataggctgaagctgtggccgttttctccccttgaaccactaactttgcaagcaagtcggcttcggctccaaaagaccatgcctcgtattcacaatgatctatattgttttccgcaataaacgctttccaaatttctttttccgtcataacctgtttcccgcaaattttatctgttcaatactcaagccctatgtattttcccttttggctcttacgagcgggagcatgggacattttgggtgcatccttcactttcattctatatctgctctattatccgctttcctcatagacgacggcgctcgagagcgccgtgccgtcctcggcgacctgccataccgagacacgcgcgtccggagagaggctgtccgccgggcaggtgatctcgttttcggagacgaacgccgtctccacgcgcctgccgtcgatacagatcacgctgtacggcgtgaagttttcgccgtaggccgtcagcgtatcgccgcgcaccgacgcgcggtgcagcacgacgtcccgcgtgccgaagcgcatgtccgtctccgcaaacgggttctccccgccgtacaccacgcggtcgccgtaaagcatgtcgtactgcagcgtgcgcagttccgtttcatacgcgccgctccagtcgttcatttggtggaatttcgtcagcgtaccgttgttgacgccgagcatctcgaacacatgcgacgcgagctgatacgccttcacgtccatgtcctcggcctcgagcgggaaattcgcccacacggcgtactccgtcgtgtagaggtttccgctgtcgagcgcgctctcctcgatctcgaggctcggcatgtggtcgccgtagacgacgagcacggccggctcgccgagcgcctcgagcgcctcggtcagcgcgcgcaggaaatcgtcgaccgcccgaagctgcgtcgcgtagtattccagctcgccgcgcagcgcttcgtcctcgacgcctgaaacgacctcgatctcagccgattcgctctccgcggggtacgcgccgtgcggctgtaccgagatcgtgtagatcaggtcgcgcgcggcggtggaatcgagcaggtcgaggatttcgccggtcagaatgccgtcctcagcccagccgatctcgttgtattcgacatcgttcatgtactcgatagaggtgaacgaatcgaacccgagcttcgagaacaccttgtcccggtcgtagaacgtggccgtgttgttgtgcagcacatgggcggaaaggccgagctcctttaaattgtatgcgatcgattcgcaggtggtgtcctgcaaaatcgtcttgtacgggtattcgccggtgccgaaatcgtgcacgttcatctgcgtcatcacctcgaattcggtgttcgccgtgcccgcgccgaccgacggcgccgtgaaaaagccgctcgggccgttttccttcagcgtgcggaaatacggcacggggtcctcggaaaacacgacgtcctcgaggtggttcacgtcaaagaacgattcgagctgcaaaaagatgatgttcggcacatcctcgggcgctttcgtctcggtgctgagcacatcctcagcgatcgcgtggatgcggcgggccgagtaatcctccggccggtcgatgccgaaatcgatgaggctgcgcgaaaaggtgtaaacgaagccgtaccgctcggtgagggtgatcacatccgaatacgcgttgcccgcaaagccggcggcaagcggcagctcgggcagcaccgccacggagagcaggaggatgcagagcgttaaaagcccgcgccgcggctgcaccgggcttttcggcgaccgccggtagaggagcacgaggccgatcacgagcagaaccgccgcggccacgaccaaaacaaacgccggcacgctcatgtaaatgccgatgaacgaccaatcgagctgcagaatcgcaaaatcgatcgccgagagcggcgaaacgcggtagctgagcacgtacatattcgcgatgccgagccccgcccaaaccgcgccgatcaagacggcccagaaccacttgcgctttgcaaacaggctgagcgaaaggcagagcgtgaggatcagcacgttgacgagaaaggcgacgggccgcgccgaaagatacgcccagaggccggaaaggctctggcggtaaagcagctcgatcagaaggtcgagccccagcgcgccgagcagacagccgagcacggcccgattgttccgaataaacgcgtgaaaccgcttgatgcgcctcgccccctttcccgtgattcacgaaaattataggcttcggcggcagcaatttcaagcggtttcaaagaatgttaagattttattcagacttgtattttttcgggctgcatgcgggccgcatctccatatcggcgaaggccgcccgtcccggcgcgtcaggcgaactgcgcgtcgtagagctgcttgtagaacgtatccgcctgcatcagcgtgtcgtgcgtgccgcgctccacgatttcgccgtcgcgcacgacgaggatcatgtcggcgccgcggatcgtcgagagccggtgcgcgatgacaaagcaggttttatcggccatcagcgcgcgcattgcctcttggatgcgcagctcggtgcgtgtatcgacgttcgaggtcgcctcgtcgaggatcaggagcgaggcgtcgagcagcatcgcgcgcgcgatcgtcatcagctgcttctggcccttcgagatgttcgagccgtcgtcgtcgagcacggtgtcatagccctcgggcagcgtcatgatgtactcgtggatgccgcacgcccggcagacgcgctccacatcggcgcgcgtggccgtctcgctgccgtaggcgatgttctcgaacaccgtgccgctgaacagccacgtgtcctgcaaaaccatcgagtaattgagccgcaggctccggcgcgtcagcccgcgcaccgggcagccgtccagccggatctcgccgctgtccacgtcgtaaaagcgcatgagcagattgatgatcgtcgtcttgccggcgcccgtcgggccgacaatcgcgaccagcgcgcccttcggcacacggagcgaaagatccttgatgatctgccggtcgggcgtgtagccgaagctcacgtgcgaaagctcgacctcgccgtccacagccttgcggtcggcggcgtccggcgcgtcggccggctcgggcggctcgtcgagcaggcggaacacgcgctccgccgccgaaaaggccgactgcagctcgccgataatgttcgcgacctcgttgatcgggccgctgaacttgcgcgaatacagcacgaaagacgagatattgccgatggagatcgaaccgccgagatacagcaccgcgccgaagaagctgacgagcgaaagcgaaagattgttgacgaaattgaccgaggggccgaccaagctgccgtagtaatccgccttatagtacgcctcgacggtctcgtcgttctggcggtcgagcttctcgatcgtattctcctcctgactgtaggccctgagcgttttctggccgctgatcatctcctccacgaagccgttcagctcgccgagctttgccgagcgcctgcggaacagcgggcgcgtgaagcccgtgatctttttcgtgagcacgaatgagagcggcaccgtgacggcaaagacgagcacgagcaccggggagatcgcaagcatcatcgcgagcgcaccgaccaccgttacaacgctcgcaaagacctgcacgaggtcgtttgaaagcgaggtgttgatcgtgtcgatgtcgtaggagatgcggctcaggatgtcgccggtctggttcgtgtcgaaatagccgaccggcagctcggtaagcttgttgaacacgtcgcgccgcatcgtgttgacgacccggcggctgatgacgatcatgagccttgtcagcgcgtaggacagcacggccgaggcgatgtacaggagcaccatcagagccgaataaaacccgacgctcgagaaatcgacccggccggtgccgagctccatcgcgtcgatcgcaaggcccgagacgtacgggcccgcgagcgcaagcagattgccgccaaccgtcagcagaatgcaggcgagaagcagcagccggtactgcagcaggtacggcagcaggcgcgagaggatcgcggtctttttcatcttggttttctctttcacgccagcacccccttcccggcggcggcttccggccgccggtcgccgatctgcgattcaccgatctccctgtagagcgggcacgtctccatcagctcgtcgtgcgtgcccatgccgatgacacggccgttttccatgacgaggatcttctccgcgtgcatgatcgagctgacgcgctgcgcgacgataatcttcgtcgccgacgcatagtgcaggcggatctcctcgcgcaggcgcgcgtccgttttgtagtcgagcgcgctcgaggaatcgtccagcacgaggatctccgggctgccggccaaggcgcgggcgatcagcagccgctgcttctgcccgcccgaaaggttcgcgcccttgatggcgaccggcgcatccagcccgccctgcgcctggatgaagtcgagcgcctgcgcgcggcgcgcggcctcgagcagcgcctcgtccgaaaggctgcggccgaggcggatgttctcgcggatcgtatccttaaacagggtgtcgttctggaaaacgacgccgaatttcgcgcgcaggtcggtcgtcgcatagtcgcggatgtctacgccgtcgatctcgatggagccctccgaaacgtcgtagtagcgcatcagggcgcggatcaccgtcgatttgcccgcgccggtcgcgccgatgatgccgagcgtctcgccgcgccgcagcgaaaaattgaggccgcgcacggcgaacgtgccgcggctgtagcggaacgtgacgtttttaaacgcgatatgcggcgcgttttcgggcaggaagctataccgcggctccgtttcaaagagctcgaccggcgtgtcgagcacctcgagcacgcgggccgaagaggccgccgcgcgggacagcatcgtgaacatgcggttgatcgccatcaaggcgttcagcacgattgtgaacaggttcataaacgcgatgatcttgccgatctcggtcgtaccgttgttgacgcgcacgccgcccgccacgatgaccgcgacgatgccgaggttcaaaagcaggctcatcaccgggttgatcagcgccatcgtcttttcggcggtgcgctccttctcggtcaggtcgtcgttgacgcgcttgaagcggccgcgctcgtaggcggatttcgagagcgccttgatcacgcgcacgccggcggcgttttcgcgcacgacgcgcagcatgccgtccgaggccttctgcacggtcttgaagagccgcgtgcccttgcgcgagacgtaaaacgtgaccgcgccgacgaccggcagcgtcgcgaccatgatcagcgtcagcacggggtcgagcgtcagcgtgacgaccacaccgccgacgagcaggatcggcgcgcgcacgccgaggcgctggatcatgccgacggtctggtgcaacacataggtgtcgctcgtcatgcgcgagatcagcgacgggatcgaaaactcatcgacgcgccgctcggagagatacgagatcttccggaacaggtcgtgccggatctgccgcgtgcagtcgcgcgcgacggcggaggccatgcggttcgccacgatgttgccggcccacgcgagcagcgagcagacgatcatcagcacgccccacacgcacaccgggccgatctcgccgagcgggatcaggtcatcgatgatgaaagagagaatccacgggatcgcgagctccaccagcgtgccgcccgccttgatgccgaagcccacgctcatccgcggaatgaacggcttcagatagacagccagtcgtttcaatacaaacccttcctttgccccgcgggcacacgcccgcctttagttgtctttgcaactattttaccatgcgcgccgctgaaatgcaaggggcatcgcgcggctgtgcagggcaaaacccggatttttttcggcagacagccgcgcgcttgccgatttttcccgcggcggcgttccgggcaccatacagggcctgcaattcatgtgggtctgcctgttccggcggcgcggcggctgagcagcgccgtttttgcggaaaatgcggcgcatcgcttgacttgccggcgcggctgtgctacagtatacaaaatatccaaaaaggagctgaccgactatgctgcacacagactttgaccccgagagaattgccgtcatcaacccgaaccagaccgttgagatggttccgaatatgcctcgcggcatggtcggcgctttctcgcagaaaattgtggatgactacgtggcgcgcaccggcagcccgcagatcgcggccttcaagagctgcatgggcgcgatgccgatctaccgctgcgtttcggcggacggcttcccgttcgcgctcgtcaacatgccggtcggcgggccgagcgccgcgggtatcgtcgaggaggcgtacgcgatgggcgtgcagcagttccttgcgttcggctgctgcggcgcgctcgaccactgggtcacggccgggcacctgctcgtgcctgaggccgccgtgcgcgacgagggcacctcgtaccactacctgccgcccgccgaggagatcgcgctcgaccccgtctgtgtgaacgcggtgtgcgcggcgctcgaagcgctcggcgtgccgttcgtgcgcaccaagacgtggacgaccgacgccccctaccgcgagacgcgcggcaaggtggaaaagcgcctgaagcaaggctgctctgtcgtcgagatggaatgcgcctcgatggcggccgccgccgaattccgcggcaagcccttcgcgcagttcctctgggcggccgattcgctttcgggcgaggaatgggaccggcgcacgctcggcagctttgacccgaacaacggcacgctgtacatggagatcgccgtgcgcgccttgcagaacatggcgcagctttgaggtgcggccatggacatttacttcccgagctgcaatttcacaaaggccagccccgaagccgcaaagcgcctgcggcgctggatgcaggcgcgcatgcccaccgccggctgttgccgcacggacaagacgccgcgcgccgcagacgacaccgccgtctatttctgtcaggcctgccgcgaggtgcttgaggatcatatgcagacgcggagcctgtgggaatacctcgacggcgccgcggattttctgccgcccgactacagcggcctgtgcgtaaatttgcaggactgctggcgcgaccgggcgcactctgaaattcacggagccgtgcgcagcctgctgcgcaaaatgcgcgtcgaggtcgtcgagctcgagcggaaccgcgaaaaggccgatttctgcggcagtctgcatgccgagccgaaatctccggtactcagggcacaggtcgcggcacagggcggcaaaccgatctgggagatgcccgccgccctcgagacggcgatcatgcgcgaacaggctgaaaaaatcaccgagcgtctcgccgtcacctactgcaaccgctgcacgcaggggctgcggaccggcggcgccgaagccgtgcacctgctcgagcttctgatgggcacggcaaagctctaaacgccaccgcctcccataaaaaattaacaaacccttaaaattccccgcgcagactggaaatgcgcggggaattggtctataatcagaatggtgttttgttgttttgtaaaaaagcatccattcaatctacatattcagttgaaaacaggagggtccgaaccatgaaagaaaatatgaccattcagaacctgtacgacctgcgcaacacgatggcgcgcccgctgctcgaaaacctcacctacccgtgggaggctctgccgctgatcggcgcgttcatcgtggagctgggcaaaacgctttcccccgaggaatacgagctgcgcggcgaaaacatctgggtcgccaaaagcgcgaagctctacccgaacatctacatcgccggcccggcgatcatcggcccgaacaccgaggtgcgccccggcgcgttcatccgcggcaacgcgctgatcggcgcgggctgcgtcgtcggcaattcgacggagatcaaaaacgcgattttgttcgacggcgcgcaggccccgcactacaactacattggcgattcgattctcggctacaaggcgcataccggcgccggcgcgattacctcgaacctcaagcaggaccactctccggtcacaatcctcgcagacggcgaacgcgtggaaaccgcgatgcgtaaattcggcgccatgctcggcgacggcgtggaggtgggctgcggcagcgttctgaacccgggcaccgttgtgggccggggcgcgcgcatctacccgctttcgatggtgcgcggcttcgtgccgggcttcagcatctataagcgcgccggggagatcgccgagatccgcgactgagagaggagccgcttatgctcgaaacgatacaaaacattctcgtgcgcgtgctgaactccagccttttatcgacgtttctgctcgcggtgcgggccgtcacgccgatcatcgcactgtacgtcatctggcgctcgtacacctccttcaaaaagggccagcgccgcaaggaccctgtcatcatgctggaggatgcggcgaccggcacgcacttccccgtgctgtactgggaaaactcgatcggccgcagccgcagctgcgacatccagataccggatgaatccgtctcgcgcgaccacgcagtgctgatgcgccgcgaggagggctggtttgtctgcgacaccggctcgcaccttggcacgcgcgtgcgcggccgggagatcacggagccggcgctgatcgaaatcggcgacaaattctcgatgggcggaacaacgctgattctgcgcaacgccgacgacacgccgaagaaaaagcgcaatatcttcaccggcttctcgaaggaggccgcctccccgttccggctgatgctgtgcgtcacgctggtgcagctctcgatgacgatgcagctcatgctcggcaccggcgaattccggctgttcccggtcgcgccgttcggcattttgttcctcacgggctgggcgctttacttcttctcgcgccgcattttaaagcgcgtcagcttcgagatcgaaaccgtggcgattctgctgagcagcatcggcattctgcttttaagcgggcaggggctggacgccatcaagacgcagatgatcgcgatgctgatcggcgtgttcctattctgcttcctcgtctggtttatgagcgacctcgagcgcgtgacgaaggtacggctttacatcgcgatcggcgcgctgctgctctttgcgctgaaccttctgctcggcacggagatctacggctcgaagaactggatcatcatcggcccggtcagcatccagccctccgagctgatcaagatcgcgttcatctttgtcggcgcctccacgctcgaccacctgcaaacgaaaaagaacatcacggaattcatcgtgtttgccggcgcgtgcctcggctgcctgttcctgatgaaggatttcggcacggcgctgatcttcttcgccaccttcctcatcatcgccttcatgcgctcgggcagcttccgcacgatcttcctgatcctcgcggcggcgtgcttcggcgttttcctgatcgtgcagtttctgccgcacgtgacgcagcgcttcgccggctggctgcacgtgtgggaatccccgaacgacctcggctaccagcagacgcgcacgctgacctatatcgcgagcggcggcctgttcggcacgggcatcggcaacggctacctgaaatacatgcccgcctctgacagcgacctcgttttcggcatgctctgcgaggagcaggggctctttatggggctcgtcgtgctcgcgggcatcgcgatgttcatcctctacgcgcgcagcgacgtgacgcgcagccgctccacgttttacgcgatcgccgcctgcgccacggccggcatgctgctctttcagacctgcctcaatgtctttggtccgaccgacgtgctgccgtttaccggcgtcacgctgccgttcatcagctcgggcggctcgagcattctctccacatggggcctgatggcgtttctcaaagcctcggacgagcgcacctacgcagcaaagcgcggcgggcgccgccgcccgggcgttgaaaacagctacatgcagatgcccgagcccgtaaaggctgtgcggcgcggcagcgcggaggacgacacggcggacatccccgtgcgcacgcgcggcgcggccgccggcagaagcgcgcagcctcagcaccgcgcagatgggacaagccgctcccgccgcatggaggtgcatatccccgaggaaaagctctcgcccggcgcgggccggcatatgccccgaaaggaggatgaccgccgatgaaaacgaccggctttcgttcctttgtgctctacattctgctgttcatttttctgggcgggctcgcctattttctcgtgatgctcgccataaacggctccgactgggtcgcgcagccgtataacggctacatctatgcggaggacgccacgctctccgccggcaccatcaccgaccgcgacggcatgatcctcgccaaaactgaggacggcgcgcgcacctacgccgaaagcgaaagcgtgcgccgctccctgctgcacacgatcggcgattccagcggctacatcggcaccgccgtgcaggccgtgcaccgctcgaagctgatcggctacaacccgatcaccgggctgaacgacacgattttctccgggttcggcgccgatatccggctgacgatcgacgcagatgcgaacgccgcagccttcaacgccttcggcgggcgcgacggctcggccttcctctacaactacgagaccggcgaggtgctcgtgaagatcagcgcgccgacatacgacccgatgaacgtgccggaggatctctccgaaaacgaagaatacaacggcgttttcgtcgatcatacgctctcctccagctacacaccgggctctattttcaagatcgtcaccgccgccgcggcaatggacgccctctcggactgggacacccgcacgtatacctgcgaggagacgtacccggtcggcagcagccagatcacctgcctcgactaccacggcgagctaacgcttgaggaagcgctcggccactcgtgcaacatctatttcgcgaagctcgcgctggacatcggcgcggacgcattgcaggagaaagccgaggaaatgggcttcggtgagacgttccgcttcgattcggtcgagacgaacgcgagcgagatcgacctcagcggtgcgagcgatctcgatctcgcctggtcgtcggtcggccaggcggaggtcatggcgaacccctaccacatggcgcttctgatgggcgcgatcgcgaacggcggctccacgccggagccgtacctcatgggcagcggcaccggcacaaaatacacgctgactgacggcacaaccgccgcggcgctccacacgatgatgcgcagcaacgtcgcgaactactacggcgacgggatgttcggcggctacacggtctgcgcaaagaccggcaccgccgagctggacggccagaacccaaactgctggatcgtcggcttctcggacgaccccgccgccccctacgcctttgccatctgcgtgcaggagggcgaatccggcctttataccgccgggcaggtcatcgccgccgcgctgaacgcgctcagcgcgtaaccagacggcgggaccatacaaaacatacgaaaagacgcccggcgcgcagaagccccgccgggcgggcacaaccgaataaagcggagggggaaccggccggttcccctccgctttttcattcacattctattttttcacattcttttacattccgagcaggctgtgaatctccgggatggtctttccggcggcgcgccacgcgcggatcgcctcgatccgcgcgacggacgctgcccgcgggtagcgccgcgtcagccgctcctccgcctgctcgaagggcagaagcccctcctccgtgtagaatttcagcgtgctgtaccgtgcgcccgtcaggcgcaccagctcgccgatcgtgacaaattccgaggcgaggaccgcctccatgcttctctgcctcgacatttctgccccccgtcatgtcgccgccacgacgatcatcacgagaagcgcctccacataatccgcaacgcgcttgatcagcgcatactgcgggtcattttccagcgccttcagccgctttttcaggtcctttttctcgtaggcggagaaaaatttcgcgaggtcgccgctgcggtccagcagcagcgtgagggcggcgatgtcctcggtcggcgcgccgtcctccaaaagctccgcacggatctcctgcacggccgcgtcaagcgccgcgggctccggcacatagaccgttttgccgccgagcaggccgccctgctcccggcgcgcgcagcccgccgcctcgagcgaagccccgacgtgctcgagcagcgcgtcgagattgcggttcgtgaattgcagcgaaaagttttcgatgaccttttcgggcttcaccggctgcttttcccccacgaagccgtagaccggcgcgaggtagtccttttccggcggcagcggcgcggcggctgtcaggcgcttgccgtcgaacgcgagcacgccgtcgagcagcagctccagcacgctgcccgccacgaggcacatgcccttttccgcgctgtaggaagccagccggttcctctccttgagcgtgcagagcaggtaggactgggtgacggatcggttcttcatcgtacattctcctttttcaaaatcaacttatcacttactacttacttcttactatttaagtatagccgcatttcccgcgcctgtcaagggggcaaaacaaaaatcccgcgggaaattccacgggatttcaaaagcgcatcagcttcgcagcttaaaggttttcggcgcaaagcggtagatcagaacacacgcgacagcgctgtacagaacgctgaacacgatcgtcagcgcgccgaacagaagcgtcggcagacgcaggttcatcaggaagaaacagacaaaatacgtcgccatcatcaccatgcggtaggtgccgcttttcatttcggtgccggcgttgtacggctgcaaaaggtagtagatcgtcaggtaatgcaccgaaaacagtacgctgacgcagattgtggaaacgatcagcaccgcgtaattcagcgggttatccgtgccgccggaggcccagagcagcgccgcgaggccgacgccgatgatcgccgcgggcaccgcgttgatcttcacgatctcgatcaggcggatctggaacagccgcagcacaaacttcggctgcttgtagaaggcgtaggtcaaaaggctgtggtcgcagttcataaagagcgcctgcgtgaagcccgtgccgcggttgatcgcgtaaaggataaaaacgaaatacggcagccacgtgagcaccataccgttgacctcgggcttgatctccggcacgaggtacagcacgagcagcaggccgcaggcgagcgcgccgcagacaaacgcgatgcgcttcgtcgatttccacaggatcttctggtgccgcttgatgaaaagctcgttgaggtactcaaagccctttttccggctcgtaatcgttgtatcggctgaaatcgccttttcgctcgtctgcttggaaagccgctttacagaatccatctggttgagcatctgggccaaaagctgctggttgaccgcgcggtagtgcgaaaagcgcacgatcttccgcacagaaagcgcgccgagcgggataaagagcagaaacagcgccgcggaaaccgccagcggcagcgtgaagccgaatgccggcggcagatacgccgcagcgagcatcacgcccgcaaacacccacaggtgcgcccgcagtttattctcgttgtagacgttgccgcttttctcatagctgcgcagctccagcgccgaaaccgtcagcttcgcgcccgcgatgccgagcggcagcagcaggcagagccaaagcggcacgccgcgcatgaggccgaaaatcaccgtgaacggcagaaagccgacgacgaccttcagcatcgcgtagccgtaattgacgagcgtgtacatccgcgcgtccatgcgcatgaggatcatcgcgtaatacttatcgcgcgtcgggttgaaaaggctcgtgttcatataggcgccgatggcggtcaggaagaaaaagatgtgcagaaacgcgccgctcgccgcggcctgctcgtacagcaggccggcgccgagcaccatcgtcaaaagatagaccagcttgccgaggaacaccgcgcacacctcccacagcacggagaggatattcgcgaggattttgagatcccgcacgctgtacagcttttccggcagcgcgcggccgatgagcggaagctgcttgatcgcgtacagaatgctgttgacgcggtatgtattccgcagcgcaaacgaaagcaccagtgttttacgcatcgttttcctccctgagcgcggcgaggatcttatccttgaactcgcggctgtcgagattcgttttctcgacgacctccagctccccgtggctgagcagcacgatttcgtcgcacaggtcgagcgcgaggtccatcaggtgcgtcgagaaaatcgtgacgcgccccgttttcagcgcgcgcagaagctgcttcatctcctccgccacgacgacgtcgagcgaagtcagcggctcgtcgagcagcaggacgttcggctcagcgataatgttgacgagcatctgcatcttgtttttcataccgtgggagtagtctttcaaaagcttgtcccggtcctcgggcgcgatgcgcatgtcgtcgaaatacgcgtcgatcggcttcgggttttcaatcgtcttttcgtggatgtcgaggaagaacttcaaaaactcgcggcccgtcaaaaattcgggcacggtcggcgtggaaagcacatagccaatgtcctccggcgcgacttcgcggcgtttcccgtcctcctccacccagaagctgccgccgtccgccggaatgtcgcggttcaggcagttaaagagcgtcgttttgcccgcgccgttgcggccgagcaggccgtagattttgccctcctcaaaggcaaaatcgatgtcgcgcagcacctctttcttctcgaagcgcttcgacaggtgttcgatcacaaatttcatattttaatctccttcttctaatttccgcctaatgcgtaactatttttattatacatcactgctggcaaaaagcaaagccgaattgcatgtttgtaatcttttgtaattattcttttgcaaatatttaacacagcagtttcaataaaaactatttacttttcgtttataatatgttattattattttaacaaaatagtgattttaaaactcttcattttatttcacttttttgaataaaactataaaaagggagtgatatggcaaaatgccccattcgtcgaacgccaccatttatttcgatgacatccgactacgaggaggtaaaaaccatgaaaaagcgctcaagaaaatttttctctattatgatggctattgttattctatccgtttgctttgttgtgccggtaaacgcagagactgctggtgacgatggagtttctccaacgatgctttgcacagactgctatgtatcttccaaagatatctgtatgggggttggtaaggctgtcgcacaaactacccatagttatagcggcggcacttgctatgtcgtccattacaggtgtgaatcaatggagtggtgcccctcttgctacagttgtctctatcagtacggctggcatgactgctatagtacacattcgtcttgcggaaaaggacgtgtaaatatttgcccgtgcggctatcctcccagtggttacgaacctgaaatataaaaaacacctctgaatcttgaggtgatcttatgaaaaaaattataagcgtattgctactctttgcttttctgctatgtaccggctgttcaacaggttcttccaaacttgaaggttttgtgcatactgaaaacggatatatgtttgaatctctaccctacggcatttctatagacgaagccggccgagcttttgaacagggaattacgcaggaacgaaaaactaacagcaagggatttgataccgtctgctatatcgaggatgttgagctgttcggcatcgaagggtacatcgacatgcagtttgccgacgacaagctgcgcgccatgaccttcaacacgcacagccactacggcgatgtggatgccgcctttacgcggatgtgcaacagcgccgagtccgcgttcggcgcgccgacggatcagaacgaggagagcgccggcacgatcgcgcgggaatcactgcgctggctggatgaagaaaccggcactgcgctgataatcgctaaggataccggcagcaatggaacacagcttggtatcgccgttacagacttcccatcggatacagccggatgaaaacggatgcgggctgcagcgaatgccgcagcccgtgccctacggagataaagccgcatgaaatggttcaagcgtttattcccctttatttttttgaccgcactggtggttggcgccgtctttcttttcggcaacttcctgcgcatcgaccgctcgcatctgaacccggtgccgtctatcgaggagatccggctcgaggacttctcctacagcccggaggacggctacaccttcctgcccgcgccgttcggtacacccgaggacgagatggtgtcgctgttcgggtacagcatatcgcagaacacaacctccttcggcgcgccgaccttcgacctgctcggcctgccggccaaatacgattcggagctgtccccggggagcattctgcacagcctcaccttttccctttcgagcaacagctgctcggtggaggagatcgaggccgcctatgcggaaatcctcgcgcactttgaagcggccttcggccccgccgatgaaacagagcggaaagaaaacgcgctcggccccttgaagatgcatacttggcgggctgaggatcattccaattatctgcgcctcgaatacagtgcgccgtcgccgcagtcgaaaaacgcctcgctcgagattttcctctgggagccaatcaactattccgaaaacaaatgaaaaaaaggctgccgtccgcatggattgcagccttttcgcttattccgttttgccgccgcggaacgcggccatatcgatgaccctgccgccctcgagccgcgactgctccgccgcgagcgcgatgaagtggctttcaagcgagttttcgagcgtcgtcgtgcgcgcggtcgccccgcgctcctcgatcagcatctcgagaaaatcctgcacgatgccgctgtccccgccgccgtggcccttgaggtcgtccgcgagcttcgcgacgtccacgacctcctccgcctcgccgaacacgcggatgtgaatctcgttcgagcgcatgtcggcctcaatttcgcccttcgtgcccatcgccttgaaatagcggtagcagttttccgtaaaggcgcacatcgtgaagctcatcgtcgcgccgtccgcaaagagcaggttcgtctgctggtggtccacgacgtcgttgtcgcactggtagacgcaccggccgtaggggccgtttcgcagcgccgcgtacgtcttttcctcggtggggtccgtgccgcaggccacgcccgccatccacgtgttgccgtgccgcacgcccgtgcgcgggtcggtgatgtagatcttctccgcatcgaacacgcagctttccttcgccttgcagccgccgagacagtacggcgccgcgccctcgggcgcatgcgcgcggtcgaacaggtacgtgctgccgacggacgaaaccgaaacgcacgttttgccgagcagccacgtgtaaatatccatgtcgtggcagcacttctgcaagatcatcgggcttgtttcgcggctgttccgccagttgccgcgcacgaacgagtgcgcctgatgccagtagccgacgttttcgttcgcgcagaccgagacgacctcgccgatccggccgctgtcgaggatacttttcagcgtgttgtaaaacgccgtgtaccgcagcacgtggcagacaatgattttgcccggacagtgccgtgcagcctcgatgatgcggcggcactccgcaagatcgggcgaaatcggcttttccatcagaatgttgtagcccttctcgagcgccgggatcgcgtgcccgacgtgctggcggtccatcgtcgagacgacgagcacgtccgcgagcttttcctgagcgagcagctcctcggcgctcgagaagcagcgctccgccggaatattgtagagcgcccgcgccttttcgacgcgttcgggccggacgtccgccacggcgacgacctgcatccgatccgggaacagcgcctgcatcgatgcgtacgtgctgccgcggtcgccgaagccggcgatcgcaaaggtgaccggtgttttcatgcgttttcctcctctggctttaaaatgcaggggcgccggccgcatcgcgtgaccggcgccccttttcagacggttttaacggcttctctcaaagcggttgatcgccgcgacgatgcccttgatcgacgccagactgatgttgttgtccacgccgacgccgtacagcgccgcgcccgcgcgctcgaggtggatgtaggaaaccgctttcgaatccgcgcccttcgagatcgcgtgctcgctgtaggagacaaatttgtattccgtgacgccgatgctctcgagcgccttgaagaacgcgtcaaccgggccgttgcccctgccgctgatcttcttcgcctcgccgttcaccgcgacggtgccctcgaaatcgacggcaacctcaccgccgaggtcgttctcctcgaacaaacggtatttcttgaggtcgtacggcgtgtgcagcttgatgtactcgctctcaaacagcgcgtacagctcctcggggttcatcgagcggccgagcgcctcgctcgcgcgcttgacctcctcgcggaaatcggggcgcatttcgaccggcagcacgaagccgaacttgtcgcggatcgtggagacggccgcgttgacgccgaaatcggccggcgcgcccgcagtgctcgcatcaaacgccgttttctggcgcagctgcagcttcttgaccgcatcttcgcgcatcttgtatttcaggatcttaccggcggcgttcatcgggaagccgtcgacaaaatcgatgtagcgcggcaccttgtgctttgccatatgcgtgcgcacgaagtccttgagctcctcctcgctcgaggtttcgccctccttgagcacgacgcacgccatgatctcctcgccgtactgctcgtccggcacgccgataacctgcacgtccttgaccttcgggttcgtgtagaggaagtcctcgatctccttcgggtagatgttctcgccgccgcggatgatcatatccttgatgcggccggtgatctggtagttgccgtccggcaggcggcgcgcaaggtcgccggtgtggagccagccctcgctgtcgatggccgccgcggtcgcctcgggcatcttgtagtagcccttcatgatgttgtagccgcgggcgacaaactcgccgtccacgttatcgggcaggtcctcgttcgtctcgggatcaacgatcttgcactcgacgccgaacatcgcgccgccgaccgtcgcgacgcgcgtgtcgatcgaatcggtcgtcttgctcatcgtgcagcccggggaggcctcggtctggccgtaggtgatgcagatctcgctcatgtgcattttatcgacgacgtcctgcatgaccttgaccgggcagggcgagccggccatgataccggtgcgcatgtgcgaaaaatcggtcttatcgaaatcggggtgctcgagcatcgcgatgaacatcgtcggcacgccgtggaacgcggtgatcttctcctgattgatgcaggcgaggcccttgcgcggcgagaacgccgtgatcggcgacatcatcgtgccgtgggtcatggcggccgtcatcgcgagcaccatgccgaagcagtggaacatcggcacctgaatcatcaggcggtccgccgtggagagatccatgcagtcgccgatggccttgccgttgttgacgacgttgtagtgcgtgagcatgacgcccttcgggaagcccgtcgtgccggaggtgtactgcatgttgcacacgtcgtccttcttcacgcgggagcggcgggcctccacctcgctcatcggcacgctgtccgcgagcgcgagggcctcctcccacgcatagcagcccttttgggtgctctgcgtcgtgatgatgttgcgcagcaccggcaggcgcttcgatttgagcgcgcctggcgcagcggtctcgagctcggggcagagctctttgatgatgccgatgtagtcgctgtccttgtagccgtcgatcatgacgagcgtatgggtatcggactggcggagcaggtactccgcctcgtggattttataggccgtgttgacggtgacgagcaccgcgccgatcttcgtcgtggcccagaacgtgatgtaccactgcggcacgttcgtcgcccagatcgcgacatggtcgcctttcttgacgcccatcgcgatcagcgcgcgggcgaaggtgtccacgtcgtcgcggaactccttgtaggtgcgggtgtagtcgagctccgtgtagcggaagcacggctgattcgggaacttctcgaccatcttgtcgagcacgtctgggaaagtgaggtcgatcagcgtctccttcggccagatgtattcgccggtgcccgcgttgttcttctgcaacggcgcttcgctgaggcgctcgtcgcggtagtcgcgcatgtagtcggcaaagcgcggaaatacgacgccggcgtccgacagctcctgcgaccagcgcttgacccactcgagggagacgtagccctcatagccgatgccgagcagcgcgtcgaacatctggtgcagcggcaggtcgccgtcgcccagcatgcggtactcgagcgcgccgttcacgaccgcgctgtccttcacatggacgtggcggatgtagccgccgaggttctgcaccgtctcctcgggcgcttcgcccatgtagcggtacgggtggtgcatatcccaaagggccgcgacgcccttgcagttcacggtgtcgagcagctttctcagccgcttcgtatcggcatagacgccgttcgtctcgacgagcagcgtgacgccgaagccctcggcgatgacgccgagcacgtggagcacgtcggcgacgtagttgtcgtcgacctcaccctccgcctcggggtgcaggtcgccgagcacgcggatgtacggcgtgccgagcttctgcgccagcacgatgtactgcgtgatctccacgatgttctggttgtggttttctttcagcttcaggccgcagccggaagccaagcagggaatttcaagaccaagttcctttagctttttcactgttagcggcagctggctgtctgtaaacggccttgccttcacggcaaagatatcgtcgcctagtccgcgcacctcgatgccgttgaactgcaggtccttggccatcgagtaaatgtccgtccatgtatagtccgggcacgccagagttgaaaagctgattttcatggtggttttgtcattcctttgctgaaaaattctaaggcggcgggcgcgcatcttgcaggacggcgcgcctcagccgtcattaccagccattatactacaaatacagccgggatttcaagcccccgcccgtaaaaaacgcgcagtcgccgcccggctggctcgggtatttttcagaaacgcgctatttccgccgcggccggcggtttttggccgccgctttcctgcacgccctgtaaatttcggggtcggcgggccttggctttgccccgccgaacgccgtctgaagcgcgtccgccgcaagcgtctccgcctgcgcggcggtgatctgcggtacagccgcatgcaggcgcgcggcgaaatcccgctccgtgccgtcgaggccgcacagcagccccgcgcgctgcaaaacgcgcagggactgcacgagcatctcgcgggcgtcggcacagcgcatgcgccgccggcggcgggaaagcaaggccgcgccggaagcgatccccgcagcgcagaccacagcggccagtgccggcagcgcccagcccggaagcacccgatccgccggcttttccgcccgatccggcgcgggggtctgcgcttcctgcggcaccgccgttggccgcgccgtcggggacggcgtaccggccgcctcggcctgcgcggtctttggcggctgcgtcggcgcgggcgacggggaaaccgcgtcgcccgtcagcacctcgaccggcctcacgtcgttttctgccggcgcctcgacgacggcgccgggcggcgtcgcctccaccggcgtccacgccccgtccgcgaacacctccacccaagcgtgggcctcgcggtcggtcagcaccgcctgatacgcgccgtcggcctgtcgggtgaaatcgtcggccacatagccgaccgcgtagcgcgcggggtagccgtacagccggaagagcagggcggccgtcgtcgcgaaatgctcgcagtagccgcggcggttgtcgaagaaaaaatattccgcggggtccgcgcccggcggtacaagccccggcgacagcgtgtactctgccgcgccgtgcagcgcgcgcaggataaaatcccgcgtgttttcaaagccggactgcggattttcgcggcagaacgcgcgcagccgctcgagcgaatccggcacggcggtatacatgttttccgcaaagcgcgcgtactgcacgcccgtgggcaggctgccgaagccggccgattcggaggcgataaagcggtccgtatcgccgtccgagccccataaaacggcgtggtacggcgtgtaatcccccggcgcgctgccgttcaagcgcgtgacgacgatctgctccgcatccgccggggcgtacattccccctccgctttcgatccagagcgcgccgccgtcgccctcgccctcgagctcggcgagaaattccgattcatcgaccgccgaccagcggccgttctcgtacacgccgccgtaaaaattgcgcaggtaaaacggccccgccggatacgaatcgagcgtgacggccagcgcctcctctccggtcgtgtaccggccgctcgaaacggcgcttgtgcggccggtatcgcccgcatccgtgttttcgggcagaatcacatcctgcacgcggcgcggcagcgccaaaagcgcgtctatgtgcggctccagcagcgcatagcccgcgaaaaagcacgcgcagaccacggcggcgagcaaaaggctcccccgcccggccgcagggcggcgcgcaccgcgcacggtgtccccgccgccctgcgccgcctcgaggtgcgcctcagcgtggaaaagcacgagcatcggcaccgcccagaacggaagctgcccgagcgccgccgtctggaccgcgagcggcacggagaggccgtaggcggcccagcctatgtgcagcacgaaggcgagcaaatacaaaaacaggacgagcgccgccgcggcgaggcagacgacctccgtcatatcgaatttcaggagcaggtacgggtcgttttgcagcagcacccacagcaggcggcatttcggcagcagcgtgtacgggtacagcgcccaaacggcgcaggcggcaagccccgccgctgcgcacgcccacagcccgcggcgccgggcgaaaaagcgcgtcgcccagaccaaaacgctcgtccccgccgcaaagcccagcgccgccgcaagatcgaaccgcaggaggttgaacgccgcacccgcgagcagcagcagagcgccggcgccgcagaacagcgcaagaagcccgccgagcccgagcacggcgccgcgccgcggcacccgcacgcggatgcggcccgcccgcagcagctcagagaaggattctgttttttccgattttttccgcataatcgtctccgttcagcttcagcagcgcatatttcccgcggtaaaggccgggggccgtgtccaccgtcagcaccgtttcgcccgccgcctcgcgcagaaagcgcgcccggcgcgccggctccggcacagggccctcggaaaacggcgtttcccggcgaagcagcgccgtgagcgcctgcaaaacatctgcccggctttcgatgcgccgcgtctcggtgcgccccgcccgcgcatcgtaccagcacaggctgtgcggggcctgcgccgcgagcagaccggcggaaagcgcgaagcagagcgcccaaaacgcgtccgccgcgtcagcgtctgccggcctgcccgcgcaaagctcccaccagacgcagacacacgggcgcgtttcgaggctgtagcgctttgagagcagcgtatcctgccgcgcgctgagcttccagtgcacgtcgcgcatcgcgtcgccggggcggtaggcgtcaatctcccgcacctcgggcggcacgccgtcgagcatgccgggcgcgccgtcctcctcggcgggtaaaagcgccgcatgctccagcgcggcgggaagctccagaagcgccggcagcaaaacggcctcggcacgcgcaccgagccgcttccgaaaggcgaaaagcgcgagcagatcccacacccagagccgctccgccgagacggtcagaagcccggcatggcgcgccgtcagcggcagatcgagcaaaacgcgcccgcgccccgcaatgctgccgtacacccgctccgtgtgcacggtttccccctgcatgcggcagacgagatcgacggcaaagcggttcacggggaaaaccgaccggttctcaatctcgaccgtgcaggtgaacggcacgagccggcgcgcgttatcctcgggcaggcgcaccgaaacggagaacccgcgccgggcgcacagcgccgcaccggcgagcaaggccgccgccgcccagagcgaaacagccgccacagcaagcgccggcacgcggtataggccgccggcgtagagcagcgccagcgaaaaaagcagagctgccagaagccgcacaggctccccctcccttcaaaattcagctatatcccgcccccatggggcggctgttctaagatttctccccttgtgcggcgcggcgtggctatatcccgccccacgagcggccgttcccggcggcccgcagggtcccgcccacgccggggcaggcgaaaagcgcgcgccgcctacgattccgatttctcccgcagcttcgggcgcggcgtctcctccaaaatgcggccgaggatcgcctcaagctccatgttctccatctgcgcgcggacgctgcgctgcacgcggtggtttgtgcagggcagaaactgctcggcgatatccgccggggcgacaaagccgtgcccctgcagccaagccgaggccttcgccatgcgcacgagcgccagcgtgccgcgcgggctcgcgccgtattccaaatacgggctgcggcgcgtggcgtcgatcagccgcacggcatagcgcgcgacggcgtcgtggacaaacacggcctccacctcgcgccggaccgcgcgaagcgcctgcgcatccatcagtgcctcgagcgcgtcggcgcgccgcgtactgtccgcgccgcgcgccatcgcgcattcgctctcaaaatccgggtagccgatcgctgtgcggatcataaagcggtccatctgcgccggcggcagaagctgcgtgccgaccgcgccggccgggttctgcgtcgcgatgacaaagaacggctcgggcaggctgcgcgtctcgccctccaccgtcacctgccgttcctccatgacctcgagcagcgccgactgcgttttcggcgaggtgcggttgatctcgtccgcgagcaaaaggttgcagaacaccgcgccgggctggtagacgaatttctcgagatctctgcggtagactgaaaagccggtcagatccgaggggaggacatccggcgtgaactgcacgcgcttccaatcgagcccgagcagcttcgcaaacgcgacagccagcgtcgtcttgcccacgccgggcatgtcctcgagcagcacgtgcccgcccgccaaaagcgccgcaagcacctcgagcgtcagccgctccttgccgaggatgacctcgtttacccgcaggagcacgtcccgcaccgccttgcgccgtatatccataatcgtttccgcctttctccaaccgatcattttctatagtataccataaattccgcgtgcctgccagaaaattttatgcaaaaagcgtccgccggaaatccggcggacgcttgaaatcggtttattttctttcctcgagcggcacgtactcctgctcggtcaacagcgcgcggtaggccgggcggatgatgcgcccgccggttgtcagctcctcgatgcggtgcgcgcaccagcccgcgatgcgggagacggcgaacatcggcgtgtagaggtcctcgggaatgccgagcatctcgtagacaagcccggaataaaaatccacgttcgcgcatatgactttcttgttcccagtcacctttttgaacgcggccggcgcaaggcgctcgatgcgctcgtacagcgcgaactggtcgccgtagcccttttcggccgcgagctttttcgcctgcttcttgagctcgacggcgcgcgggtcggaaagcgtgtagatcgcatggcccacgccgtagatcaggccgcttttgtcgcccgcctcgcggcgcaggatacgctcgagatatgcctcgacctcgtcgtcgctgtcccagtgctgcacgttccgcatgatgtcggccatcatctggcagaccttgtggttcgcgccgccgtggcggaagcccttgagcgagccgatcgccgccgcgatcgtcgaatagatgtcggtgtgcgcggaggagagcacgcgcgcggtgaacgtggagttgttgccgccgccgtgctccgcatgcagcaccatgcacaggtcgagcagctcggcctcctcgcgcgtgaagcggcggtcctcccgcagcgcgttcaaaatcgcctcggccgtgctgtgctcgggctcgaacgggtgaaagaacatcgtctttttatcgaagtggcggcgcttcacctgataggcgtacgtcatgatcgccggcatgcgcgcgatcagcgagatgctctggcgcatgttgttctcgagcgagaggtcgtccggatcgtcgtcgtaggaatacagtgtcaaaacggcgcgggcgagcttgttcatcacgtccttcgaggggtttttcatgatgacgtcctcggggaagtattcgggcagctcgcggttctcgtagagcagctggcagatgcgtccgtactgccgcttatccggcagcttgccgaagatcaaaagccacacgacttcctcgaacgcgaagcgcccctcggcgcggcagccgttcacgatgtcggtcacgctcatgccgcggtagctcaggcggccctcgtcgggcaccttgtccccgtcgtcgatcaggtagccgtgcacgttgcacacatgcgtcaggcccgccataacgccggtgccgtcctgattgcgcaggccgcgcttcacgcggtagtaatcgtattcatctttcgaaatcgcgttgttcgcgcggtactccgcgcaaagctcgctgacagtcgtgctcgtcgcactctcgttgatcagtctctgcacagcactcaccctttccggaaattacgcccgaggcgtattgtgtctattgtagcgcggggacgcggtttcgtcaagcactctgcatattttcttttccaatcctgcattttaacagaatttatctttgattttcacctttcatctgttcatttttgcatgattgcgcaaatatatctgcaccttaaaagaaaggatgtctctcatgaagccaattctccgccgcacgcttctttttgccgccgctttatacctgctgctgggcctcagcccgctcgtgcttcggctggccgccgcgcagccggcgcaggccgcgccggcgccgtccgcctccgcgtcgcccgcccccgaagcggacggcgctgccgcgtttcgcatctacgacgaagcgcgggcgcaggtgctcaccgtgccggacgcggactttctgcgcggcgcgctgccctgcgagatggcgctcgacgcgcccgacgaggccctgaaagcacaggccattgcgatttatacgttctacagtgcgcgccgcctgcaaaacaccggaggcgacgcggatttcacctgcaacagcgcggaaaagcagatctatatgacggatgacgacctcgccgcgctctacggggagagctgggacgaagcgaaggcccggctcgacgcgatctgcgccgaggtttccgggcagcagcttttgtacgacggggcaccgatcgaggcgaccttttttgcgatctccgccgggtgcacgcagccctacgaaaacgtgtggggcgagaagagctacccctatctgcaggccgtcgcctgcccctccgacatgctgtacgacggctaccagacaagcaccgccgtgacgccggacgcggtgcgcgaggcctttcccgacgtgcagtacacggacgaccctgccggctggttcaccgacgcccgctgctttgaaggcggctatgtggaaagcatctcgctctgcggcacggtgctctccggcaccgcggtgcgcgaggcgctcggcctgcgcagtgcgagcttcaccgtcacgtttgcagacggcgttttcaccttcacgacgctcggctacggccacggcgtcggtatgagtcaggccggcgcgatttacatggcggaaaacggctcggcctgcgcggagattctcgcatacttttacccgggcgcaacgctctctgcctagcgcgcccgccgcttccccgctgcgccggaatacccggacgaaaagggccgccccaaacggagcggccccgaagccgatggccttatttcaccttgaagcgcaggatgcgcatcgtgttgagcaccgtgagcgccgtaacgccgacatccgcgaacacgccgacccacatcggcacgaagccgaacgggatgcagagaattaccgcggccttcgtcgccagcgcgaacacgatgttgaatcggatgacgttcatgctgcgccgcgccaagcggatcgcccgcggcagcagcgcgaggctgccgctcgagagcaccgcgtccgccgtctcgatcgcggcctgcgagccgaggccgaccgcgacgccgcagtccgccgctgcaagcaccggcgcatcgttcacgccgtcgccgacgaacacgcgcctgccctgcatcgcctccacggcctttgccttatcctgcggcagaagccccgcgcggtaatcggtgacgcccacctgcgccgccacggcctgcgccgccgtttcgttgtcgccggtcagcatgacgatctcgcgcacaccggtctttttcatgtcggcgatcgccgccgcggagtccggcttcacggtatccgccagcacgatgccgccgaccgcccggccgtccgccgcgatcgcgaccgtgcaggccggaagctgcgaaacatccacgccgttctcctgcaaaaaggtgctgcgccccgcgaggatgcgcttgcccccgacgaccgcctcgatgccgcggcccgcgatttcgcggatctcctccgcctcgggcgcatcgccggcggccgcgcggatcgccttggcaaccgggtgcgtagaaagcgcctcagccgaagccgcgagcttcaaaagcgcctgctcggaaacgccttccgccgtccagaccgaggagacggagagcgtgccggttgtgatcgtgccggtcttatcgagcacgaccgcatcggttttcgccagcgcctcgagatacttgccgcccttaatgagcatgccgatcttcgattctgcgccgatacccgcgaagaagccgagcggcacggaaatcacgagcgcgcaggggcaggaggcgacgagcatcgtcagcgcgcggtacagccagaccgtaaacgcgccgaggcccagaagcggcggcagtaccgccacgaggatcgcgagcacaaggacgatcggcgtgtagacgcgcgcaaagcgggtgatgagcttctccgcgttgctcttgcgcgccgaggattcctcgatcatgcgcagaatgcggctcgcggtcgaatcttcaaacgcgcgcgtgacacggagcacgagccttgcgctgccgttcacgccgccggaaagcacactgtcgcccggcgcgacctccaccggcacgctctcgccggtcagcgccgcgttgtcgatgtaggagctgccctcggcgatcacgccgtcgagcgggatgcgctcatacgggttgacagcgaccatttcgtccaccgcaaccgtggccggcgaaacgatctgctcggcgccgccgcggagcacacgcgcggtatcgggccgcatctccgtcagggcagtgatgctgcggcgggagcggctttcggcgatctcctccgcgcgctcgccgaggttgaacaggatcgcgacggccgccgcctcgccgaactcgccgaggcagaacgccacgatgaccgcgatcgacatcagcacgttctcggtgaaattcagcttgacgaggttcttcacgccgtcgataaaaacgccgtagccggaaagcacggcggcgaggccgtgtgaaacggcagacgcccaaaccggcagatgcagcacatgctcgaaaacaaggccgagcgcaaacagcgcgaccgcggccgggaacacccacttcggcgcctccggaccgtggctgtgatcgtggccgcaggcacagccgtgttcatggtcgtgatcgtggccgcagccgcatgcactgtgatcgtggccgtgcccatggtcgtgaccgcacgcgctgtgattgtggccgtgcccatggtcgtggccgcatgcgctgtgatcgtggccgtgcccatggtcgtggccgcatgcgctgtgatcgtgctcatggccgtggccgcagcacgccgcgccctcaccggcccgctttctcttttcctctgccatatgtcccataccctttcgataatatatgttcatttattcatatatcgaccaaaagaataagccgtgcggcttattccgatatatgctcgaggcccatcaggtagatctgctgcacatgcgcgtcgtcgagcgaatagtacgactgcttgccatcccgctttaccttgacgagatgcgcattgcgcagcagccgaagctggtgggaaatcgccgactgccccatctcgagcagctccgcgatctcacagacgcacagctcgcgctgaaacagcacgcacatgatgcggatgcgcgtcgtatcgccgaacatcttgaagagctccgcgagctgaaacagcgtgtcaagcggcgggatgctcgcctctaccgcctgcaaatcggcgtgctcgtgctcgccagggcagatgaccggctcttttttctcctttttcttcggcggcttcggttcagaccgcgcggccttcgccttttcctttttcgccatgatcgttccgcgcctccttttaatacatgaatgattgttcattcgttggttttattatagcacaccgcgctgcaatgtcaataggcttttcaaaaatatttcactctttcttgagcacggcatacaacgccttgcagccgcggagaacgtcgcggtaggtcgcgtcgaaatcgccggtgtaccatgggtcggcaatgcttcgccgctcgccggcaaattcgagcagcaggcggatctttcccgccgggtcgccgcccgtgatacgctcgatcccccgcacgttcgccgtgtccatcgcgatgatccagtcccagtgcgcgtaatcggcgtgcgtaagctgcaccgccgcgcgcctctcaaaggggacgcccatctcaagcagctttctgcgcgtgccgctgtgcacgtcatttccgatctcctcgcggctgaccgcgcacgacgcgatctcgaaccgttccgcgtccccgccctgccgtacgatctccttcatcacaaactccgccatcgggctgcggcagatattcccatggcaaacaaaaagtacctttatcatatttaaaaatcctctataaaattttctttccagattaattttaagggacggaaaaccaatttacaggatagcgtccctccggggtccggacattcctccataaaaaacagccccgcggattgcctgaagtagtcaatagttagtagacataaaatttcttatgccaccagttctgttctatacgggactggtggttttccttttagtttgcggacgggtcgttcattgttgaaatagtagattgcctgctcaatggtagatctcagatcatcacattcccagtaacggaagtgcttgcgcagcgtgtccttgaatcgcccccaaaagctttccataactgcgttatcgcgagggtttccggcccttgacatactttgaattacattgtattctttaagcaggttacaataacctgcggatgagtactggacaccttggtcgctgtgcaaaaggatttggtgttcggtgctcatttttcttttcagaaggcgctctgccggcttcataacgaggaaattgtcaaaagtatcgctgagttcccattccagaatctcgttgttgaacagatccaaatagcctgcaagataataccacttgccgttatgtttgatataagtaacatccgtcacaatcttctgcatcggcttctctgctttgaattttctgttcagtacgttggcatagcggatgtgttctaagttggttcctgtggccgcagctttcctgcgcctggtgtatccgtgaattctcagtcgcttcattgacttccaaacagtaggatcactgacgatccaaccgaattcaaggtacagcttatccctgatctggcggtatcccatcattgggtggtgggaatggatgtccaggacataactatccagtattttatgtgttttctcataccggtttaactgtcctgctcgcttcaaccacttgtagtagccgctgcgagaaacaccgtagatttcgcaaagttcgctgacagaatgtttgtctgtctgcttttgaatctcagcatacatctctcggatcatctttttcgggcatcgcccccttttcgttcgttccgtttttttaaacgaagtacctccgcctctttcttaaccagctctcgcttcagcagttcgatctggtattgcagctgctcctcgtaggtcagttccttccggcgctcataacgagataaaggattcccgggtttcttcttaacttccagcccggcttcaccttctgctagatactttctggtccactcttgtattaaccgatgactgcatcctgtttctctttcgagcgaccttgaagtttctcctgctaaattcctctttacaatagctaacttttcttctttgcttcgcatcgtgtatttaccagccatattgccacctccatgtctataatagcataaaaataatggtaggcacttttgtgtctaccattattttatcacttcaggattgccacaggactgttttgtatcacatatccatgtcgagggatggttttttctgttggatgcgcaaaggctccggccgggggctttccctatccccccgcagcttgaacaaaagcgccaaaaaggccgtcagtatctgcgaagataccacgctccaccacacgccgctctggcccagaaagccgggcaaaataaagagcagaatcagcagaagcaccggctccgcatacacgcagatataggaatacaggttcttttccgtggcgtaaaagctggaagtggtgatccgggagaaagcatagaacaacaggcccagcaggaagatgggcagcacctccgccaccatcgcgccggtgctttccgatgcgccgaacaagccgcccaggccgccccgcagggcaaagagcaggctgttgcaggcaaacgccagaacaatcgccgtcacataggcaactcttctggtatgccatacctgagccgcttttccttccccgtaatactggctgataaggggctgacttccgtcgcccacgccctgcatcagcatctggacaatcgtcagcacataggccaggcaggcgtagcaggccaccgctgcctccccgccgttcatcatggaaaaccggttaatcagcatcagggacaccatcggcgataaggtcagcccaaagggcgcgatccccaccctgacgatattccccgcgatccgtccgaagccggacagggagcctttaatcgggagcttccggtagatcagataggcaacggcttccacggtcgtcaccgcctggcctaagattgtggcaatggccgcaccctccgtgcccatatcgaacgcccacacgaacagataatccagaacgatattcgtcaggaagccggacatcataacgatcagcgcaaagacagaacttccgttattgcggatgatcggaacgataccggtggcaaagatctggaaggcggccccgatcacgatcacgtccagatattccttcccaaggacaagaagctggccttccgcgccgaacagccgcaggatcggctctgtgacaaacagcaggcccgccgtcgtcgctatgcttaccaaaagaagcaaaagcagaacgccccggacatatttccccgcctcctccgggccggaggttcccttcttcaccatccacaaaaccgagccgcccatgccgatgcccgttcccagagactggatcagcgataccaccgggaaagcaatattgatggcggaaagtcccgcgtcgcccatgctgcggcccacgaaaaatccatccacaatcgtatacaccccggacagggcaaacgccagaacggagggaatgacaaatcttgcaaacatcttatactggttcatttcactcctctgcctccaacttcttctccatcagcgcgttaaaggcgctgatcgtctcaaacatctgtatgatcttttcttctccgagtaccgagaaaacagattgctccgcccggtaaagcggcgccagaagctctttggcatacgccgcgccggtttccgtaaggcacaccagcttttcccgcttatccttcgatccgggccgcagggacacatatccctgctctgcaagctcatgcaccacgccgttgacggtctgctttgggaagccgtaaaaatcgcagaggttcttctgcgtcatgctcccgtaaatgtccagcccgtaaagcgtcatcagtgtgatgtaattcaggccgaagtgttccgcccagcggcagtacagcgcgttcgtctggctccataccgcattgaagtcatgctgctgtttccgaaaatctggcttcataactcacctcctactagtcttttaccggactattatagtatcctagaccacggtttgtcaagaggtgtttttggcgattttccatttaaacagtgtattgtttccttatataaaagagcctgaattgtattataaaaagaaaaggctgccggcaagtcgtaaaacctgccgacagcctttatccggacctatctctgtcgctaaaaaatgcacccttatcacgtttgaatgcattgtatcaaatcgtgctacgcaaaccagtaagagtgtgtgccaatagctatctatatctttcttgaagtattctgttcttaaacttctgaaaacgatgctacgcattccacacggaaatttttacggcgaatcatctaatttccatctctgttttccgcatctttccaatgctgcaattctttcttcgcctcatcagagttccgaaccgcccactgcaaaaacataagtatcgcctgttccattgttcagatgattggctgccaatatctgtattgcccgacgattttcattcacatacccagcaaatagtttttccattgctccaaattatgctttacatgatattcgtcaaaagcattataacacgcatcctatctgcaaatttaatatcaatcggcggacagcctgccttcatcaattccagattcacaagcagccgtcccgttcgcccatttccatcaataatttcctgtatgagccgcacgcgggtctgcctcagatgcggacgataccgaaggattgcagcagaagcacaaagagtaaaatcggcgcaacgatcttgatcatgacgatatagagtgttttgcgccggaagcggaagccgccgagcgtcacctcgtcgatgacggttttcggcttcacaatccagcccaccaaaatgcaggtcagaagcgcgacgagcggcatcaggcagttgttgctgatgtaatccatcacgtcgaggatctgcccgaccgtgccattcggcagcgtgaccgcgaaatacaggaaattgtagccgaagcaaacggccgcgccgaccaaaagcgcgtacgccgtcacgagcagcgtgctcttcttgcggctgaaatggaatttatccatgatgctcgagacgatcgcctccatgaccgacaccgaggaggtgaccgccgcaaacgtgaccatcaggaaaaacagggcgccgatcacattccccgcgccgcccatcgcctcgaataccttcggcagcgattcgaacatcagccccggcccggcggacataccctccgtgcccacaaaggtgaacaccgccgggatgatcatcatgcccgcgagcagcgccacgaacgtgtcgaaaaactcgatctggttgatcgacttgatgaggttcgtctctttctttgcgtaggagccgtaggcaaccatgatgcccatcgcgacgctgatcgagaaaaagagctggcccatcgcgtccatcaaaatgacaaggaagcgcccggccgtcatgccgctgaaatccgggacaaggtagattttcagcccctcgaggccggtgcgcgtcacgccgttctcatccgtgtgcgaaagcgtcagcgagaacacggagatgccgacgacaagcagcagcagaatcggcatgagcaccttgctgaatttctcgatgcctttgtcgatgccgctgtacacgacggcggccgtcaaaagcagatacaccaccatccagacgaccggctcccacgtgccggaaatataattgccgaaatagccgtccgccgcggcgccggccccaccgcccgcagcgaacaccgcgaggtatttcagcacccagccgccgatcgagcagtaatacggcagaatgatgaccggcacgagacaggccaaaacgccgaggaaatcccaccgcggacgaatgaccccgtaggccgtgagcgggctctgcgccgttttgcggccgatcgcgatctccgtcgtcaaaagcgtaaagccgaaggtcagcgcaagcacgatgtagcacaaaatgaacacgccgcccccgtcctttgccgcgaggtagggaaaccgccagatgttcccaagccccaccgcgctgccggctgccgcaagcacaaagccgatctgccctgtaaaattccctcttttttctctcttttccatgccctcatacttccctttccgcacaaaacactgatttcaccgctttgacaaaacgcacggcggcacgccgcccgcggttttcgccaagccctcccagtataccgaaaaaaagcgcggtctgcaaggcccgaagcccggcaaaccgcattcttttttccgcattcagccgcgcgccatgcgcccggccgcaaaccgggccagctccttgaggcgcggcgcggcgtgcgcgaagaatttctcatagctttcgcagaagatgctccgcccgagcgcgccgtccacctgcacgggccggtagcgccggcagccgccgcggcagagcgcgaaaaagcggcagacgcggcatttttcgtcgaccgcccgcgactgctcgataaagccgagcgctttccgccgctcgccgatcgcctcgaagctgtccgtgcagaggttgccgaggcggtagccgtcgagcacgtagaagtcgcacgggtacacagagccgtccgcctcgacgacgtgctgcatcccgcagacgccggccatgccgcacgcctcgggcgggcagccgagcagcatctcgatgtagttttcaaactgccggattgaaaccgcctcgccgcgcttcgcatcgcggtaccacatgtcgaacagcgtgcagaggaagctgccgtaatcggcgggcgtcagcgaatacggctcttggcccggcgcgtcgccgatcgggtcgaggcacgggataaactgcagatagcgcagccggttccgcttgtaaaagctgtagatctgcccggcgtgcgccgccgtctgccggttgacgaccgtcaggatgttgtactcgacgccgcggctctcgagcagctgcaccgcctgcatcacgcggttgaacgtgcccgcgccgtgtgcatcgagccggttcacgtcgtgcgtgtccttgacgccgtcgagcgaaatgccgacgagaaagcggttttcacgcaggaaatccgcccattcggcattcagcgccatgccgttcgtctggatcgcattgtggatgcgcacgcggctgacattgtgctttttctggagcgcgacggccttgcggtagaaatccagcccgatcagcgtcggctcgccgccctgaaaggcgatcgtgcagtcctgcgtcgcggccgcaaggcttttctgcacgacggcctcgagcgttttctcctccatgaagccgtaggagcgctgctcccgcttttcgacgatgtcgtggtagaagcagtagcggcagttcaggttgcacatgcccgaggacggctttatcatgatgtgtacggatttcaaggcgattcccccttcacgcggccgcgccccaaggcccgcgttatccgcgcttgtattttttgcgcagcgcgtcggcgcccgccttgcgccccgtcttttcgaggcgctcgatgtattcgtcgaggtggccgtgcgtgtggtacgggccgtcctcgtggagtaccgtcatcatcgggtcgacggggctcgcggatttgagcatctgctcgtcgtgccagtcgaggatgatcttcgcgcccttcgcgcagagctcggggtgcgcgtccttcacgtcgtgctgctcgtgcgggtcctcgcgcaggttgaagagcatctcgcggtcgaagaggtggaagccgtcgtggtaggtgcgcacatagagccagtcgccgaagcgcgccgagcgctggcagacgtgcgccatctgcgagagcacgaggctttcgcgcccggcggctttgccgtccgtgaccgtctccgcaaagctctcgccgtcccaccgctcccacggcttcacgccgaggagcgacgccatcgtcgggagcaggtccagactgtagtggaggccgttatcggcgatgcccgcctttccgcccggccacttgaggatgaacgggatatggcaggtggggtagtcggcagtcgcgtgctcggaatagatcgcgagctcgcccatgttctcgccgtggtcggaggtgatgatgattgccgtgtcgtcgtagatgccctgcgcgcggagcaggtcgaggatctcgccgacgagcgtgtccgtgtagcggatgccgcagtcgtagccgtccataatgcgcttgagaccggccatatccgaggcgctgcccggcatgcgcgggtaggcggggcttgtcgcgtcgctgtacatcgcaagctcgttgatgccgtgcgggccggtggcctgcttgtgctgctcgagcacgtcctcgccgatccacgtgttcatcggctcattttcaaacgggttgccaaagctctccggcgcgcggtacggcgtgtgcgggtcccagaaatgcacgtgcaggaaccagttgtcgcgcccctcgttgcggcgcagccagtcgagcgcaaccggcagaacctcctcgccggattcgccgccgcggccgccgacgttgtagcactcgttgaagcccgcgttgaaccaccaagaggaatggcgctccgggaaggtactgacggacgccgtgtgcatgccggcgcggcggaaaatgctgtggaagcagttgtcgtccacaatatcggtgaagtcacgcgcggggccggtgagccggcggtccgccgccgtgccgccgtgacccacggcgccgttgtggatgccgaacatgccgctgacgagcgaggcgcgggagggcaggcagggcgcgtccgagcagtaatactcgtcgaagcggatgccctcggcgcagacgcggtccatattcggggtcgtattgcggccgtagccgtagcagcccatatggtcgggccgcagcgtgtcgatgtcgatgaacagaattctcatggttgtgtctcctctccgttttgtttccgctttcattttaacactttacacgccgcgggaaaatgggtattatgatatgagattagcacaattttatccttttatggggaggcatcgcaaatggaggcaaacggcatacagcgcgagaacatccggatgcagggcggcctgccgatcagcatccgcctgcacaagaacggcgcggagagcggcggctgcgaatttcactggcacgagcagctcgagctttactacgtgcgcgccggcggcgtctctttgctctcgggcgggcagcaaagctggctttaccccggcgacgtgggcttcgtcaactggtgcgagccgcaccgcggcagccaatttctcgacggaacacagcactatattatccagatcagcgccgagcttctcgcgcaggagaccgttctcctgcccggggccgccgcgcgggccgatctgctctccctattcgcggcgcgcagcaggcgcttcccgcgcgttctgcgcggcaatgcggcactgaacggctttctcgacgaggccatccgcgaatcggaggcacaggacgccggcttcgagctgcggctgaaggctgacgccctgcaagtcctcgcgattctcctgcgggagagcgccggcgcgccggaaagcctgccgcacgggcgcgacgcagccgcggcagagcacctcaaaaaggtgctcgtctacctctccggccactgcaccgagccgggaaatgtctcgctgccggcgctcagccgccgcttcgggctttcggtgccgtacctgtgccgcattttcaagcgcgcgacgaacctcacgctgaccggctatgtcaacgagctgcgctgcgcgcgggccgcggcgcttttgcaggacggcgcgccgctcgaaacggccgcggccgcctgcggcttttcagactgcaactatttctcgcggcttttcaaaaagacgatgggctgcccgccctccgcctacaaaaagcagaacggacgcaccgcgcggcagtcccgcggcacgtccgcctgatgcgtgattttatgcgagcgtgatgttctcgccgacaaggcccacgtactggcccggggcggcggcctccggatgcacgagcagccacttgttgcgcgcaaagagcatctcgtcctccggggttttggcggcgcgcttttcgatcgccgtgttcgtgcccttcggcagcacgacgacgcacttgaagccgccctcgttcgcattgcacggcgcgtagtggagcgtcgtcgcatagacctcgatgaccgtgccctgcggtacgaggaacgcctcgaccttcgcggtgtcgtacttgccgcccacgatgtcctgctcggcgccgatcaggaggatcaggtcggtcacggcgatgttgatctcgctgtcgcggtggtactcgaggccgttcagcttgtggttgttgccgttgcagtagccgatctggatcggcatgccgccgtacagcgagtaggcgatgtcctccgcgctcgcgcaggcctccagcgaagcgtcgccgggcacatacgtcacgcctgcgggacacggcgtcgcgcccatcgcctcgatgatgtcggcgcagtcgagcccctcgatgaccttgccgtatttggagaacgcggcatccgtaaccttctgaatctgcatgtaaatcaacctttccgataaaattttgtgaatttccgaacaacttcggtacaactccgctctcattatactgtaggccgcgcggaattgcaagtgaaaaaagcgccctcgccgcggaaaacgagccgcggccggaggcgcttttctcatatctttcggttttgggcgctgtaccgccgcgccgcggggaaatcagcccatctcacggcggcgcttgagccgcttccagacgatgatcgcgatatacgctgcgaggaacacgaggatgatcgcgacgagcaccagcgaatcgcccgggccgcccatcttgacctccgcccagagcgtgtcgagcagcgcgctcgtctccgcgggcaggttcacaaacacctcggtgttcgcgagcaccgtgtcgtccgggtaatagatcgggttctcgaccgcctcgggcgagagatacgctttcgcggcggattccggcgtcgcgtagccgacatagtccatattcgcgccggcgatctccgggtcgcacatgaagttgatgtactgctccgcctccgccttgtgctcggcattgatcgggatgcacatggcatcgacaaaatagttcgtgccctcctcgggtacgacaaattcgatgttgtcgttgttctcgacgagcacgccggcgtcgcccgaatagtacggcgcgagccacgcctcgccgctttccatcttgtcgaagatctgatccatgacgtacgcctgcacaaacggcttctgctccttgagcagcatggctgcctgctcccactcgctttcatctgtcgtattgagcgagaaaccgaggcgcgcctgcgcgatggcgaacgcgtcgcgcgggttgtcgaacatcaaaatcttgccgctgtactgctcgtcccagaggatcgaccagctcgtgaccggctccgtgatatagtcggtgttgtagaagaggccgaccgtgccccacgtgtacggcacggaatgcgcgctgcccgggtcgtagtccggattgcggaactgctcgtccacgtattcaaagttcgggatatttgaaaaatcgagctcggcgagcatgttttccgcgatcatcttcgagaccatgtagtcggaggggatgatgacgtcgtagttcgcgccgccgcccgcgagcttcgaatagagcgattcattgctgtcgaacgtcgtgtagttgacttcgatgccggtgcgccgcgtgaactcggcgttcacgtcgagcgagccctcggtgccgttcgcaatgtattcgccccagttgtagacattgatcgtcacgccggtcggcgcggcgtccgggtattcttcggagaaatcccagccggcctcctcggccgaagcgggaagcgccgccgcggaaagcagcaggaaaagcgcaaggaaaagggaagccgtttttttcataccgcacgctcctgttccgcccgctgggccttccgctcgtcgcgcgcctgccgcacgttgatgatgacgagcagcacaaggatgcacacgaaaagcaccgtcgaaagcgcgttgatctccggcgaaatgcgctttctcgtcatcgaatagatgtagatcggcagcgtctgcgttgtgccgctcgtgaagtagctgatgacgaaatcgtcgatcgaaagcgtgaacgccataatcatgccggtgacgatgccgggcatgatctccggcagcacgaccttgaaaaacgcccgcaccggcgggcagccgaggtcctgcgcggcctcatacagattcgggttcatctgccggagcttcggcagaatcgaaaggatcacgtacggcaggcagaacgtgatgtgcgcgatgatcagcgaggccatgccgaggctgcgcccgccgaacaggctgaccgccgcgacgaacagcagcatcatcgaaacgccggtcacgatctcggggttcaccatcgggaaattcgtgacgttcatcatgatcttgcgcggcagctttttcatgcggttgatgccgaccgccgccatcgtgccgagcaccgtcgcgcagagcgcggagacgaccgcgataatcagcgtgttgagcagcgcctcgaggatgtagcggtcctgaaacaggcgctcgtaccagcggagcgtaaagccgctgaacaccgtgcggctcgaggtctccgtatcattgaaggagaacacaatcaaaacgagaatcggcgcatagaggaagataaagatgagcgccgtgtaaatcttcgatacgattttcacaggatcatccctccccccacgctggcgtcgccgtcgtcgaactggttcatgatgcccatgcagatcagaatgatcaccataagcacgagcgaaatggccgagccgaggttcgggttgtacgccgagcccagaaactgcatgtcaatgaggtcgccgatcaaaaggtttccgccgccgccgagcatcttcgagatgatgaacgtggaaaccgccgggacgaacaccatcgtgatgccggaaatgacgccgggcatgctcatcggaaacacgaccttgaggaacaccttgcggtcgttcgcgccgaggtcctgcgccgcctcaatcacgctgctgtcgatcttcgtcagcaccgagtagatcggcagaatcatgtacggaatataattgtataccatgccgagcaccacggcgccggcggtgttgatcatgtgcaggcgcggcaggccgacagccgcgagcatgttgttgatgaggccgttatcctctaaaagggacatccacgcatacgtgcgcagcaggaaattcatccacattggcagcatgacgagcatgatcatcatgctctggcggctcgccttcatgcgggagatgctgtacgccagcgggtagccgagcagaagggagacggccgtcgcgattgcgccgagccagatcgagcgcagaaacacgttcgaatactggccgacgcgcaaaatattgtcgagcgtgaacgcgccgcttttatcggtaaacgcgaagaacgccacaagccccatcggcaccacgatgaagagcgtcatccagatcgtgtagggggcggagatcagcttagtccgcatcgtccgcacccccttcctccggcgcctgcatatcctcccccatctcgtcgctgaaggagctgtagtcgcccatcgtgcccgagtagacggatttcgccatgacatggatgtcgtccggcgtcagcgcgaggccgatccggtcgccgaccgcggccgaatccgtcgtctggatcatccacttgaagccgtcgacgtcgacgataatctcgtagtggacgcccttgaacgtgacgctcgtcacctcgccgttgatgtgcgcggcggcggagccggtgggcacgatatcgatatcctccggacggatgaccacatcgaccggcgccattctgccgaaaccgctgtccagcgacttgaagcgctgcccggcgacctcgacgagatagtcgtcgatcatcgtgccgtccagaatattgctttcgccgataaaatccgctacgaaagcatttttcggttcgttgtaaatgtcgatcggagagccgatctgctggatctcgcccttatccatgacgacgaccgtgtcgctcatggagagcgcctcctcctgatcgtgcgtgacgaagatgaacgtaatgccgatggcctgctggatctttttcagctcgctctgcatgtccttgcgcagcttgaggtccagcgcggaaagcggctcgtccaaaagcagcaccttcggctcgttcgcaagcgcccgggcgatcgccacgcgctgctgctggccgccggaaagctgccccacgccgcggcgcgccatgccgttcagattgaccatatgcagcatctcggtcacggttttctgaatttcatcctcttttttgcccttcaggcgcatgccgaacgcgatgttctcgtagacgttcaggtgcgggaagagcgcgtacttctggaagatcgtgttcacggcgcgcttgtgcggcggaacatcgttgatcttctccccaccaaaaaagacatcgccgctatcgggtgtgacgaagccgccgatcgtgcgcaaaaccgtggttttgccgcagccggaggggccgaggagcgtcacgaattcaccgtcaccgatggtgaggttgaaattcttgagcacctgctcgccgtcaaacgatactgcaatgtctttcaaagtgatgataggttttaacatggaaagcatcccctttgcggtttggtagggcgcaaaagccccccgaaagttgcgtggtcttagtgaatcacacaccccggctgtgtttatgcacactgcttccgcaaaggattttacgcagaccgcagggcatcgccccgcaataaggccgcggcagaggcattccgtttcagggcaaaaaaaatttgcgtcccacagcggaacagccgattttatttggttttagatgcaaacgcaatgagctaagtttacggaaaaagtcgaggtttgtcaaccacttttccgtaaaatgtaaatgttttttgaattctttacactgcgccctccggcgcaccgtttccgggcgcgtttttcgtcgttttacccgttttccgcgcccgaaaaaaacgcgcgaaccgccgcgagcgcctgctcgagcgccggcgcgcggtacttccgcgtcagaaacgccagaaagtaccggcgggaaaacacgccgcccgtcacccgcacacggcgcagccgcccgcgctccacggcgcgcgccgcgagcgccgcaggcagaaccgcaatgccgaggccgctttcggcgaggcgcagcaggccgagattcgtcgcgccctccgcctgcgggcgcggcgtgcagccgtgcgcctcgagcaccgcgtctacacagcttcgcccgccgctgcccttttcgcgcagcagcagcggcctttcggcgagctccggcacagagagcgcatcggggcagtcgaaatcccatgcgcacacggcctccatcgcctcgctgaacagcggctgcaccgtgcagcccggggcgtcgcccaccatgtcgagcagcgcgaagtcgatcgcgttttccgaaaggcgctgctcaatctcccgcgagttgccgatgaaaaccgaaaccgtgagcgacggcacggccgcccgcagtgcggaaagcaagggcgcgaggaagcactccgccaccgtggcgttcgcgccgatgcggcaggcggagggtcccgccccgccgcggatcgcctccttcgaggcctcgaaccggctcaggatagcctccgcgtccgcgcacagccgccggcccggctccgtcagatagattttccggccgatgcggtcgaacaggcgcacgccgtagaacccctccagctcccgaaccgcgatgctcaccgcgggctgcgtcatattgagcgcctccgccgcgcccgtgacgctcattctgtcgcacaccgtcttgaaaatctgcaaatgccgcagcgtcatggccgccgaccgcctttctcccactcgctttttcgctcttcgatccgcgcccgttccgccgcgcagagatcaaattcataagcaattacttatgctttagatagtaacatgtgcattgatttatgtcaagaagcccgctatactggaaagtgaaaacaaagaaaagtgaaaataaggaaaggaagtctcccccatgcccgaaaacacaagtcctgcggaaaagcgctcgcgggcgctcaccctgtttctgaccttctttaagatcggcgcgttcaccttcggcggcggctacgccatgctgccgctgatccagcgcgaaatcgtcgaaaagcgcaagtggatcactaacgacgacattctcgaggtcgtcgccatcgcggaatccacgccggggccgatcgccgtcaactccgccaccttcgttggctaccgcacgggcggcttctccggcgcgctgctcgcgacgctcggcgtcgtgctgccgtcgtttgccgtcattctcgcgatctccttcgtcctgcgggagttcgagagcctcaaggccgtgcagtacgccttttccggcatccgcgcgggcgtgctggcgctggtgctcaaggcgctgtggtcgatgtataagcagagccccaaaaacgcggtctcctacgcgctcatggccatcgctttcgtgctcgtcgcctttctcggcgccgatgtgctgccggtcatcatcggctgcgccgcggtcggtctgattgtcacactgtatgcggggaggaaaaaaggatgattctgctcgagctgtttctgacctttcttaaaatcggcgcgttcaccttcggcggcggctacgccatgctgccgctgattcaggaggaggtcgcggcgcacggctggctcggcagcgccgccctcgtcaacttcgtcgccgtgagcgagagtacgcccggcccgttcgccatcaacatcgcgacgtatgtgggcgcggagaccgccggctttttcggcgccttttgcgccacgttcggcgtcgtgctgccgtcgtttgtcatcatcctgatcgtcgcgaagtgctacgacaaattccgcagcagccggatcgtcggcggctgcatgtccggcctcaagcccgccgtggtcggcctgatcggcgcctcggtcgtctccgtcggcgagacggtgctcttccctgccggcctttccgccgcggctttcggcacagcggcgctctgggtctcgctcgcgatcttcgcggtcagcgccgttttcaccttccgcaaggcgcacccgatcctcgtcatctgcctttccgccgcgctcggcatcgccgccggctacgccgggcttctcgcctgaccgggcgcgcggttttcccgcccgtgagctgtccaaacaccactttcaaaatgcacagcacagaaaaacagcgccggcccggctgggtcagcgctgttctttattcggtgcgcatcacgctgcgcctttcaggcatctcatcccggaacgtccggtcgtatgtgggccggtagccctgcggggaaaaggcacgctggctgcggcgcacagacagggcgaccagcatgccggccgtcgccgccagcacgatcaaaaacggcaggagccccgaaaacgaccacgaggccttctgctccgcgtgcacgacgaccgacggcgtgccgcccgcggcggccggcggctcagccgtggcctgtgcctcatcggccggcgcctgcgcgggcgagatcgcgcggaacgaatcgaagagcatctgccccgcgatgcgccgcccgtcctcccgggccaccgcctcaagctgcgcgcgcacggccgcaaaatcgtcctgcgctgccgcggcggccgcctgcccgccgtcctctccggcgggcgccgtttcctccgccatcgcgggcgcgcagagcgccaaaaccagaaatacagccaaaaaggccatgcagatgcggcgcacaagccgcaccgcgctttccctctccattcaaaatcaccctgccttgccgcggcggtacaacccctgccgcgctatgtaaaaagattacagattcacaatacctgttacaaccttgttacattttagcacaggccggatgattttgcaataccctatcggaatttcggcggtgcgcccgttaagcctcgggctgcgcgtctgtgggcaggcgccgcaaaagcccgtccagccgggcggcctgctcgtattccatccgctgccacgcgccgccgcgctccatcaaaaacaggttgccgaaatgcgtgaattcccgcgtggtgccgtccgcaagcgtcagcgtcagcacgagcgactgccccacgtattcgtccggattctccgaaaagagctgccgcagccgcaggccgttcaaataggaaacgacctcgccgatcttgtcgcggtccgtatagacgcgcgcccacgtctcgctctgcggcagcgattccacctcgatctgctccacactgttcggctcaatgggcgcaatttgggcggcacagcccgccagtagcgcggcaaggcacagcgcaagcagggccgccgcaatccttaaagcaccgatcactttcataccgtttcctcccgtccgtttttcagccggccggctccccggtcggttcgttccaatcgagcggcgtgccgtccgcattctttgggaaatagaaatcgtagccgtatgcgtccgccgcgtcgaattgctcgagctgctccgccgtgaacagcccgcagacgcgcatcgtctcccccgcagcgctctcctgcggcagaatgcgcaggtcgtagccggccgcagccagccgctccgcctcccgcgcgtacgcgtcgtccgcggggtcgatgcgtgtctcctcggcaaacagatcgaacgccacgaggaagcgcacgtcctcgccggcaaagcggtccagcatgtcttgtagcggctgttcgatcgtccaagtgccgttctgcggcgcggcataacacgtcgccatctcgttttcgcccagatagcggtcgatgattttcccgctgaagcccgcatcggcgctgtcttcggccgtttcaggcatgccgcccgcctcctgcacggcgccttccgccgcaccggccgtttcgttcgacgtgctgcccgcgtaccgcaggcgctccgccgcaaacgcccagccgacgagcaggcaaacgcaggcggcgagcgccgcgccccagcgcacggcctgcgcaggaaacgcgcgtcgcgcaggctttgcctcctccgcctcgaggatcagcgcgtcgtccacaaagctcagcgccgcaaacagatcttttccggtcattcggctttctccccctttgcccgccgcgggctgtgcgctgttttcccctttcaaacggaaatcccctccttctcgaggtattcgcgcagcctgcgccgcgtgcggaacaggctcgtcttgacgcggctctcgccgaccgcgtaccgctctgcaatttccttcacggaatccataagccagtagcgccgcagaaaaaagaggcggctctcctgcggcaggccgcgcaggaaatcggagagcagaccgccgagctcgcgcagtgcctgctctcggccgccgtccgcgccgggcacgcaggccgcaagctcatccgtgagcgaaacgacgtccgcacggcgctttgcggcgttcagccagtccagccggttgcaggcgagattgcggcagagcttcgccagaaaggcgaagaagtgcgcgggccgagccggcgggatcgcgttccacgcgccgaggtacgtgtcgttcacgcactcctcggcgtcctcccgcacgggcagcaggcggcgcgaaaggccgtgcagccgcgccccgtatttgacgtccgtctcctgaatggccgccgcgtcgcgcgcccagtacagcgcgagaattctctcgtcttccagcattttaccgctccctttcttcccttcacccataaggtaagtatttcgccccgcacggttacaaaacttttgaaaaaataaattttaggcccggtgccgcttgaaacaccgggcctaaaggaaacacgcccggcagccgccggccggcatcagccgcgcatttccagatattcgtcgtacgtcgtcacgcggtcgaacgtgccgccctcgggcagaatctcgatgatgcggttcgcgacggtctgggtgaactcgtggtcgtgtgaggaaaacagcacgacgcccttgaactcgatgaggccgttgttcaccgccgtgatcgattcgaggtccaggtggttcgtcggctggtcgagcagcagcacgttgctgccgaacatcatcatgcgcgagagcatgcagcgcaccttttcgccgccggaaagcacctgaaccggcttgtacacatcctcgccggagaagagcatcttgcctaggaagccgcgcagatacgtttcggtcgtatccttcgaatactgctcaagccatttgatgatcgaatcctccgtgtcgccgaaataggcggagttgtcctgcgggaaatacgagcggctcgtcgaaacgccccatttgaacgtgccctcgtccggctccagctcctccatcaggatcttgaaaagcgtcggcacggcgaattcgttgttcgcgacgaacgcgatcttgtcctcgcggccgaccgtaaacgatacgttgtcgagcaccttcacaccgtccacggttttcgagaggcccgaaaccgtcagcacgtccttgccaagctcgcggtccatcgtgaagccgacataagggtaccgccgggaggaagccggcatctcctcgaccgtgatcttgtcgagcagctttttgcgcgaggtcgcctgacgcgacttcgatttgttcgccgagaagcgctggataaagttttgcagctccttgatcttctcctcggccttgcggttctggtcgcgcagcatgcgctggatgagctggctcgattcataccagaaatcgtagttgcccacgtacatcttgatcttgccgtaatcgacgtcgacgatgtgcgtgcagacgttgttcaaaaagtggcggtcgtgcgagacgacgatgacggtgccctcatactcgatgaggaaatcctcgagccatgtgatcgccttcgcgtcgaggccgttcgtcggctcgtcgagcaaaatcatatccggctcgccgaacagcgcgcgcgccagaagcaccttgaccttctcggtctggttcagcgtgctcatcgtgctgtacatgccgcggctgtcgaggccgaggccctgcatcagcttcgcggcctcggtttcggcgtcccagccgtttagctcggcgaattcggcctcgagctcggcggcgcggttgccgtcctcctcgctgaaatcgggcttggcgtagagcgcctccttctcagcggcaatctcaaaaaggcgcgcgttgccctgcatgatcgtgtcgaaaatcgtctggctctcataggcgaagtgatcctgcttgagcaccgacatgcggtatttcgggtcgaacgacacgtcacccttcgagggctcgaggtcgcccgagaggatgcgcaggaatgtggatttgcccgcgccgttcgcgccgatgatgccgtagcagttaccgggcagaaattgcaggttgacattggaaaagaggttctggccgtcgaaattgatggccacaccggaaacgttcagcataatacgaaaacctttctttatttcaaaatatattgaatgtatttataaatcgaacgaacgcattcgctcgaagatcacggctcatctttcagccgcgcgtacattttcatatcgagaatcctgccgttcttcacggcattgcagcgcagcgttccctcgtattgaaagcctgccttttcgagaacgcggcaggacgcggcgttataggagaacggttccgcgtaaatgcggagaatatcgctgttatcgaacacatatgtgcaaacctgtcggaccgcctccgtcatcataccctttccccggtattcctttgcgatataataccccagctcggccgttctccggtgcacgttcccctgccggaaaacgccgatgcttccgaccgctttgtcctgcaccgtgacggcgaacgcaaaggtctctctttcgtctgcggcaagcatggcggatataaacgccgcgccgtcctgctcggtatagggatacggcagtccatcccgaagattatcgagtatttctttatccgacaacacctttgcgagctctgccgcatcggaaggcctccatttccttattttacaaaccatatctgcgattctcccccttcacatcggaattgtgttgcgggaaccgactgcccccgcactgcttaaaacaccggccggcttccagcattaaaggatgcttcggccctcccacgcggcgggcttcggcaggccgagcacctcgagcagcgtgggcgcgatatccttgatgctcaaactttcgagcgcgcggccggcctcaaacggcgcgccggcgaacacgactgggatcgtcatatcctcggggatgtcctcgccgtgcatgcggccgtgcccgccgtggtcggcggtcagcgcgaggctgtagcccgcgggcagcgccgcatgaacgcgccgcacgcagccgagcgcgtgggccagcgtgcgcaggtattccggcgacatccagccgcagttgtgcccggcgcagtccgtatagccgaggtaaaggaacgtgaaatccggctgctcgcgcacgatgtagtcgatcgccgcgtcggtcagcgcgtcctcgctctcgaggccggcctcaagcggcagcgcctccgtctggaagcggctgaaatcgagcgagccggggcggttcaggtcgcgcagctcctcccagttgtagaacatcgccgttttaccgccgaatttcttgaccacgtccgcgatactctcgatcgggcgcaccatcgggtgccacgtgttgtccgtgatgccgtgccgctccggctccaccgagaaaaagagcgaggcgtggcacggcagcgtcatcgagggcatgactgtccgcgcgtgaaagcacgacgtgcccgcccgcatcagcgcctgaaacgcgtcgtttccgcacgccgccgtcccgtccgggcgcatgccgtcgatcaaaatcagaaccgccttgtttttcatcctgcaatcccgcccgcgccgcgcacgggcttttcctttcgttgtgctttctaagtgtaagatgctgcgcggcatgcggcttccacgcccgccgcacagcccgtgcagatcagccctcggcaagcgcgaaccgctcgacggcctcggcgaagccgtcgtccgcgcacggcgcgacaactacatccgccagcgccttgaccgcggggatcccgttgccgaccaccgccgcgaggcccgcggcgcgcagcataccgaggtcgttgccgttgtcgccgaccgccatcgtctccgcggggtcgagcccgagcgccgcgcagagcgagacgagcgccgtgcccttattgcagcccctgcggttgatctcgatgttgtctacgttcgagtatgtgatctcaatgccgtcgagcgcacgcaggcgcagaagcaccgcctcgcgcaccttttcggggatgaacatcatgttgattttctccggctcggcgccggtttcgcgcagatagcccgaaaggctgtccgcaaaaacgtagcgcttcgtcagaaagtaaaacagcttttccggcaggccgtaaagcgtgcccgccttttccgggtcgccgcgccgcgtcacgccgctgccgttcacgtaatattccacgtagagcggatagtcgtcgaaaatacgctgcacctgcatcgccgtctccgtcgggatcaaatcgctgcacagcagcctgtcctcgcgcaggtcccacaccgcgccgccgttcgaggtgatcgcgtagcggataaacggcagctccgtcagacacggcgggatgaagtttttcacgcgccccgtcgccggcaccagcagcacgcccgccgcgctggcccgctccatcgcctgccggttgcgcgcggaaagctgcgcgtgcccgtgcagcgtcgtgccgtcaagatcaaaggccacgagccgaaccggcttcctctctgtcatcttcaaaaatcccatccctttccgcgccgcggcccgagccgccgcagccttttgccattccatcttaatttacacgaaatcgcgccggaaaacaagggctttgcggacttttttaaacttcttcacaaaaatgcgcgccgcacttgccccctgcaccgcaccgtgctatactgaaaccggaaacagagcgcgccgcatgccgcaggggcggcggccgcgcccgcagaagggggcttttacctatggaaaacacgaaaatgcgccgcgcggaccgcgcgctcagccgcgaggctgcgttcgaagcgatcgaccgcagtaccttcggcaccgtgtcgatgtgcgcgccggacggcacgccgtatgccgttgcactcaacctcgtgcgcgacggcggcaagctgtactatcacgccgcctacgagggcctgaagggcgatttgctccggcagaacccgaaggtctgcgtgctctttgtcgacggcgccgagatcgacgagccgggcctcacgacgcactacgcctcggcggtcgtccgcggcaccgcgcgcgagctcacggatctcgaggaaaagcgcgccgcgctgcgcctgctctgcgcgcgttttgcgccgagcatcccgcaggagcagatcgcgtgcatcgaaaccggcccggcccacacggctgtctggtgcatcgacatagaatcggtcaccggcaagcacaacacaccgaacgcataagcatgccagaaagggcggccgatcaggccgccctttttacttccgcgccggaaacccacgctttttactgtatcggtccgagctccgcgtcgcccgaggtggtggtgatgctgaccgcagcctcgcccttgccggcgatatattcgctgccgctctgcttcacattgaaaccgcacgtcatatcgccggaaaccgtcgagtagcggcacgtgaagccggcctccgtctccggcccgcgcagcgtgacgccgccgctgaccgtcgagatcgccgtctcctccgcccacgtctgcatcgtcagcgaaaccgcgccggaaaccgagccgcagtccgccgaggccgcggcgccttctgcctcgatcgtgccggaggtcgaggaaattttcagcgtcccggcccgaacgcccgcgagcgccgttttgccggagacgttccccgcctccagccgctccgtgccctcgagcccttcgccgcggatcgtgccggaggtcgaattcagcgcgagccgcccggcgctgagattggaggcttcgatgccgccggacaccgttttcagcgaaatctcgcgcgccgcgaaatcagccgtttgaagcgtgcccgaggccgtgtataccgagatcctcgaaaggtcgccggcaagcgctctcggcacctgcacctcgagccgcttggaatcgccgccggaaacgccgaggttcagccaagcgctgttccagcggaccgtgagcttgccgccgtcgatttcgagcgacagcttttcgtcctccttgagcgcgcgctgcgccgtctccgtgacggtcacgtcgtcgccgtcgtaaagcgagagcgtcacggggccggcggcccagtcgatcgccagctcgtcgaggtactcgagcgattccgtgtaggtgtacggcgtatcgtagctgccgttctgctccgtatctctccaaaagccgagcaggtcgcgaataccgaagccggtcgcaagcccgaaagccagcacgccgatcgcaaacacggcgacgcagctcagcgccgcgattttgagagccttatgcgttttcatcccgatgcctccctttccctcagccgcgctcaatcgccgcgtgcagaatggccgagacggccggcgcggcgatgaaaatgatccatgtgatgtcccagcggtgcgtcagaaagctcagcaggaaatacaccgcgaccacgagaacccagaagccggattcgaccgccttgagcatcgggcggcctccgccctttttgcggttgtacaggtcgatgacaatctccggcgggtcgttgtgcttcggcttcgtcagggtattccagatcaaaatcgccgtcgctatgcccgcaaacgtgaacatgcccgcgacgccgagcgccgccatataatcgctgtgcagctccgagctgagcacgccgagcacgatgaccgggatgatgctgaaaatatacagcgagacggcaacggcggtcagcgccgcactgcgcctgcggaagtggtacatcgccttgtagtaggtcgcgccctgcccgccggcggggtgccccggctcctcgcggcgcatctcctcgagaagctccgcaatgtctccgatgccgtagatcgtgatattgtaggcgtcctcctccgttttgccggaggcgacgagatcgttgtatttgtcgagaagattctgcacaagctccaccttcatctcataggcgcgctgcgtatccggcgcatcgcggaagagctcgtcaacgtaagccctgatgttgtactccattaaaatcaccactccttgttttctcgaaccccggtttgaaccatgctccgctaccggatcagctgctcgatgatatttcgggaatactcccagtccgaaagcagcgtttcgtaatacgcgcgcccggcagacgtaattgaatagtaccgcctgcgcgcgcccgtgttctcgtccccccaataggagacgatcagcccgctctgctcaaggcggcgaaacgccgtgtagagcgttgcttccttgagctcgtactgcccgccggtgatccgctggatcacgcggttgatgttgtagccgtagctgtcgccgtgcgtgagctgcgcgagaataatcgtatccgtatgcccgcggatcagatccgccgcaatcgccatagcaaaccgcccctttccttcgtcttgagaaatatcttatctctttaacatacatattacacgcatatacctcgcctgtcaaggtatattttgaatttttgcaaaaaacaccggatttcgacggaaccggcaattcttttattgaaagccgcagagggttatggtataatgaagcatatattctgtacatttttacaaaacaagggccgttttcacggcatcacccccaatttccggggatcataaccataaggagcgtgcgccatgctttgccttcccgtcgttttcctgtgcaacacccttttatttctcaccattttaaacggacgcttccggatggcgaccagcctgatcgcttccggtgcggcctatgtgctgtcgctgcttttaaacctcctgctctcgcccgccttcaacgacgtatccgggcagatcggcaacgggatgaacgtgtttctcctgctcgccgcctcggttttcctttatacgaacaatatcgcgcagaagctctttgtcgccatactcctcgtgtgcaactacagcttcctttccgccttcacggaatactttctcggcgtgctgccgttcggcgccggcggctttctcgccgtcgtgatcggcattgtgctctatcttttcttctcgttcctctcgctgatcacgtttgtgcggcccttccagtattttgcggaccgcggcccctcagtgctctccatcggcctgtgctgcgcgcagctcttctgcctcttcctcgcaaacggcagcctgctcgggcttttcggcgtcgaagcctatgcaccgcgctttttctccgcggtgcttttctaccttttcatcgcgttcaccgtgcgcgccgcctacaacgcggcgaagtataaggaacgcgcctgcaccgccgatttccgcagcgcgctgatgcaggccgaggccaactacttcaacgcgatggtcggcagcgtgacaaacgcgcagaccgcccgcgaccaccaccgcttcatcctcggcgagatcaccgaggccgcgcgccacggcgatctcgagaccatccgcaccacgatcgccgacgagggcgacctgcgcgacccgctgctcgaccgctacagcgagaacccgtatatcaacgcggtcgtcgccgcaaacgccgcgtacgcgaagcactgcggcatccgcctcgagagcaatgtcgagctcggcgccgcgcggctgaaaacgattgaattctgcgtcatcctcaacgacgcgctcgtgtatgccatcgaccgcgccggcgccgccgatacggacgacaagctcgtgcgcatgaccgtgacgcccctcgagggccgcatcacatttgaggccgtctactccgcgccgccgcagaaaaagaagcgccgggcgctgaacgcgcagtccttcaatgtgtgggccgcctcactgctcgagccgaaggccgaagaggatgcgccgcagctcgaggccgtccgcggcatcatcgcgcgcacaagcggcacgatgaaccgcagcgccgccggcggctcggagatcctgcgcatcgttgtcaacaactgagcgcctttcggttgaaaatctattttgaaaggaagcgatcgcccatgaaaagcgaacccttatacagcgaggtcgccgcggcgtatgatttcggcagcgaaattctgtccatcgccccgtacggcaacggacacatcaacgacacctatcttgtcctgtgcgcgggcggcgaatacgtcctccagcgcatcaacaagtttgtttttccgcgcccggacaagctcatggagaatatgctcggcgtcacgcgcttcgtcgcgggcaagctcaaggcgcagggcggcgaccccgcccgcggcacgctgaccgtgctcaaaacggcggacggcgccgactggtatatcgacagcggcgggcattactggcgcgcaacgctgaacattcagggcaccacggcctttgagagcgccgcctcgcccgagatgctcgcggaatccggcgcggccttcggcgctttccagcgcatgctcgcggattacccggccgaaacgctgtacgagacgatcccgcattttcacgacacgcccgcgcgctttcgccagctcatggaggccgccgcgctcgataaggccggccgggtgcaaacggtcgccgcggaactcgcgttcgcgcgggcgcgcgaggccgactgcgcagtgctgacggacctgctcgcgcagggcgcgctgccgctcaaggtcacgcacaacgacacaaagatgagcaatgtgctgatcgacaaccgcaccggccgggccgtctgcgtcatcgatctcgacaccgtgatgcccggcctcacggccttcgacttcggcgattccatccgtgcgggcgcttccacggcggccgaggacgaaaccgacctcacaaaggtgcatttcagcctcgcgctgtttgaagcctataccgcgggctttttccgcggcgccggcggcgcgctgaccgaaaccgaaatccgcaccctgcccgtcggcgccaagctgatgacgctcgagacaggcatgcgtttcctcgccgattacctgaacggcgacgtctacttcaagaccgcctacccgcggcacaacctcgaccgcgctcgcaaccagttccgcctcgttgaggaaatggaagcccagtgggacggcatggcggcggccgtatcggcatatctctgagccgcccggccgagcagatgctgcaccgataaaaaatgaaacaggctttccgcgcacagcgcctcggaaagcctgtttttatttgccgcccggcaccccaaaaaaagccgcgcgcccctcagtgccgcaccggcggtgcggtccattttccagtgcccctcgcgcagcccttccctttgccggaaagcgcaacgaagcccgggataaacccgggcttcgttgcttgaaaaaggagatttatgaaaaagactcgtactcaaaattaagtgttccgcctgcggccttatccggccgaatcctgcgcctgtgcggtcgtagcgctctccgtcgtttcagaaagcgtcagcgtaaccgtcaccgtctgattggaggacgggcggtagaccgtgagctctaccgtttcgcccggcttctttgcattgatcgccgagcggagaaccgtctcgctcgtgagctctgtgccatcgatcgcggtgatcacgtcgcccacctgcaagccggaggcctgtgcctctgcggaattcagcgcgccgacgtattcgccctgcggcagaccgtagaagcggcccgtgaggctgtcgataaactggcccgagataccgagcattgctctgtccttgacatagccgtactcgatcaggtcggaaataacgggctgcgccgtctccgccggaattgcaaagccgaggccctcatagcctgtggcgctgatcttcgcggagttgatgccgacaacctgaccgtactggttgacgagcgcgccgccggagttgccggggttgatcgccgcatcggtctggatgtactccatcgtatagcccgtggagctgtttgtgatcgcgcggttcagcgcggaaacgtaaccgatcgtcacgctggagttaagctgatagccgcccgggttgccgatcgccatcacctgatccgccacgcgcagatcctcggaagagccgaactccgccgcctgcaagccggtcgcgtcgatcttcaggaccgcgaggtctgtcagcgtatcgctgccgaccagctccgcctcatacgttgtgccatcggaaaggatggccttcagagacgtcgcgccgtcgaccacatgcgcgttcgtgacgatgtagccgtcctcgctgaaaatgatgccggagccttcgccggcgggggaaacatcgctgttctccgtatccgtctgcataaagccgtactgctgcgtgacctgatagttctggatgcacacgacagacgggatcagcttttcggcgatatcctgctcgctcagcgcggaaaccgacccggattcctccggctcgctgtttaccacgcgtgaaatcgtaaagagtgcgttgtcgcccttcgattcgatgccgatgacgccgttctggatcagcagcacaaaggtgccgagcgtcgccgcggagaccagcacacagcagagaacaactgacagcagctttacgccaaacggcgcgccgcgctttttatgcggcgccggcggcatgacaccgcccggaacaccgcccgtgtggtacggcccgctctgggcgctccacgtgtaggtctgcggtacgttctgctggctggagcctgcgctgtatgtgctgccgtacgcatacggcgtttctgcggttttctgcgttcctgccgagtcaggattttgggcggtatgaaagccgtcctgaaaattctcatgattatcgctcatgattccttactcctttcacataataccatattccgaaggatttttcaacctttatttttccccttcgggttgattctattatctcgatcttatgtgaatttcgtgtgaagcatgtcggactttttcatgacaaattaaagaaatctgcgcgaagcgccttcactggcgttcacgcgctgcgctttgccttgtttttgccgcagattttccggcccgcggtcattccgccgcacctatagcaaaagagccgccggcatacacagctgcatgcccggcggccctagaattgaattttcaggcgtttaagccgtgagcttcgcgctcttgagcgcctttttgatgatggccgcgagcggcacggagataacgaccgccagcacagcgttcacgctgctcgtcgcgagctttgtgacgagcgcgatgcccgccgcctccggcgcactgcccgcgagcagagccgaaacaaacgacttcgcgaggtacagcacgatgtacgtcacgctgccggccaccgccgccgcaaaatagcgcggcgtggaaattttgcattcgccgagcatgctgccggagagcctgcccttgaacgcgatcacaccgcacacaaaggccagcaggaatttaaagaggaacgtgaacggcgcggaggcgacatacgccgggtttgtcaggtcgtacagcatcgcgccgatgccggacgccagcccgccgccgaccggtcccatcacaaagccggacaaaagacagaacacgttgccgaggtgtacgcgggagatatcgcccaccggcaccgggatcggaaagctcaggtaattcgacacgaacacgagcgcgccgagcaggcccaccgtgacaaccctgtaaatcgagcctctgtttttcattttttataccccatttcctttggtttaccgtcccctgacgcgcaggggcagcggcgcactgcatcctaccgccgcaggccggccgcgcaacgcttcggcgcgcattccgctgcgcgccgcgccgctctttcggttttgctcagtatagcacgcatctggtctgctctcaatacccagtttttgttttttatttaaggtcagattttttaaagttgcaaaaccgcggcaaacacggtatactgaaaactgcgggccagagccgccgaaatagcgcccgccgcacatcgcgcggcaggcagacaaagcagagggatgatcctatggccaaggtaaaagctgtaatttttgatatggacggcacggtcgccgacacgctcgcgtcgatcgcgggcttcggcaacgccgcgctcaaggcgcacgggtatccggagatcgaaaccgagcgctaccgccggcttgtcggcaacggagcggacgtgctgatgcgccgcatgctcgatgcggtatcggcgcagccgtatacggaggcagacgtgcaggcgctgcgcgccacgtacgacgcgctgtacgagagcgacccgacgcgccttgtcgcgccgtaccccggcattccggcgctgctgcgcgatgtgcgcgatgccggggtcaaaaccgccgtgctctccaataagccggacaacatgacccgcttcatcgcgggcgcgcttttccccggcctgttcgatattgtgcacgggcagcgggcgggcgtccccaaaaagccggacccggccgccgtgttcgagatctgcgaagcgctcggcgtgcggcccgcggaatgcctctatgtcggcgacagcggcgtcgatatgcagaccggcgcgaacaccggcatgccgactgcgggtgtcacatggggcttccgcggcgcagacgagctgcggcagaacggcgccgtccacctcgcagacgacgccggggcactccgccgcctgatcctgtaagccgccgcgctgctgtcggcagtccccgcggggcactccgttctccttaatacgccaaaaagggcacagaacagcgcatgctgcctgtgccttttttatttgcgtacgcttccggattcagcgtttattgatataaatccccggtataccagtcgattttcccggccttgagcgcgtcctcgaatttctcgggccagtagtccggcgcactgccggaagcgtaccacacgtccgggaaaagcgggttctcgctcgccttgatctgcgcggtatcgacgttcgcgtcctcgccctcgcgcaccttgcgggccatgacgacggtgcggaaattgtcgtactcatacgagcaggtggaaagcatgatcgtgcggtcgtcctcgttcagatccacgccggtatccaccatgctgcgcttcatgacgtcgtaataaaactgcatcttttcctcgggcgaggagaaatcgccctgcaaatagttgaacaccttgccctgcgaagcgagcgtgttcgtcttgaacacggagacgatcttccagtcgccggcctccttgtacgtgtcgtactgaatcaccggcgttttcttcacaacctcggggtcaccgaagctgatgaggctccagaacatgcgcccgtcctgcatgctgtggccgtgcaggagctggttatccgcgccgaccggagaagaagcgtcgagaaagatgctgccgtacttggtgtcctctttcttgtagttgcggtagaggtaatactccgggtcatccgccggcggcagaagcaccggctggttgatgttcgtgttttccagccgcagccagccggaaatatccgggttgatctcctgcagcttttcgatggcctccacgcggcgcgcatcggcctcgccctccgtctcgttttccgcgggcgttccggcaacgccgccggcctccacgaacacctcctgaatctcctcggcgttctggtccgcaatgaacggattgacgaccatctcccagatcagcacgccggccgaaacgaggaaaacagcggcgaatacgacgataagaaccgtcagccacacgctgctttttctacggcccgagggctcggggtcatcctccaccacctgcacgcggcggcgcatatccggcatttgcccgttgctgtactgcttcatgtgttttccctacctttccgcccgcagctgcgggtcacgcttcgtcgaccggcaggccggccagatagcggcgcaccatatcgagcgccttcgaggccgcgcagtggcggtgccactcgcgcgacttcatgcggcccgcaggctggcgcttcgcgacccacgtgctttttccgtcgctgagcgcgatatagaccagaccgaccggcttttcggccgtgccgccgcccgggcccgcgatgcccgtgatgccgacgccgatgtccgccccgctcgcgcgcacgatgccctcggccatcgcgcgggccgtctcctcgctcacggcgccgtgcgcctcgagcgtttcgtgcggcacgccgagcagcttttccttcacgcggttcgcgtaggtgacgcagcccatctcgaacacgtcggacgagccggcgacgtccgttatgcgctttgcgagcaggccgcccgtgcaggattccgccgtcgcgagtgttttacccgccgcgcgcagcgcatcgacgacgagcgcctcgagcgaatcgacgtccacgctgtagacgaagctgccgacgcggcggcggatctcctcgaccaccggcgcgcagagtgcgtccgcctccgcctgcgtcgcggccttcgccgtaacgcggacgaacatctcgccctccttcgcgtacggcgcggcggtcgggttgctgttctccgtcaggtcggcgatcatctcggccacggcggcctcgccgcgcccgaaaacgtggacgctgtgcgaggcgatcaccgcgctttggaactgcgcgagatacggcacggcgtagttttgcagcatcggctcgagctctgaaggcgggccgggcagcatgacgacgagcttgcccgccgccgtctgaaacgcgcagcccggcgcggtgccgttgtcgttctgcaaaacggtgcagccctcgggcagcatcgcctgcttgatctggttttcactcagcccgccgcgcgcgaaatactccatcagccgcttatagctcggctcgtgcagggcgagcgccttgccggccgccgccgcgacggtctccttcgtcaggtcgtcgccggttggcccgaggccgccggtcgtgatcagaatatcgctgcgctcgagcgcgtcgtgcacggccttttcgagccgcttcacattgtcgccgacgaccgccgcgtacagaaggtcgatgccgagcatcgaaagcgccttcgccacgatcgtcgtgtcggtattgacggtctggccgagcagcagctcggtgccgaccgataaaacttcagcctgcatttgcatttccctctttcgtggatttacagatggcgcacctcgacctgcgcgaggcagtcctcgagcagcgccgaagcgtcgagatttctttccgccgcctcgacgagctgcaaggtcgggcgcgtgcgcgggtggcgcggcgtgaacaccgtgcagcagtcctcatacggctcgatcgagatgtcgtacgtgtcgatgcggcgcgcgagcgccacgatctccgccttgtcgctgccgatcagcgggcggaacaccggcatgtccgcggcggcgtctgtgcaggcgatcgcctgaatcgtctggctcgccacctgcccgaggctttcgccggtgatcagcgcgccgcacgccttttcgcgcgcgatgcgctcggccgcgcgcatcataaagcggcgcatgataaccgtcgcgagctcctcggggcatttgtcgcggatctcctcctgaatcttcgtaaacggtaccgtcaccatctcgatgcggcccgcgtactcgccgaccttcttgagcagcgccacgactttttcgtgcgctcgctcgctcgtatacggcggactcgcgaaatggatcgccgtcagctctacgccgcgcttcgccatcatccacgccgcgaccgggctgtcgagaccgccgctgatgaggatcgccgcgcgcccgccggtgccgaccgggataccgcccgcaccgggctttgtctcgccgtggatatacgcgcccttctcgcggatctcaatgcgcacaacgatgtccgggttgtgcacgtcaaccgtgaggtgcgggttcgcacgcagcagagcgccgccgacctcgcgggagatctgcatcgagtcgagcgggaatttcttgtccgcgcgcttcgattccaccttgaaggtcttgacatccgctagcgtttcctcgaggtactgcggcgcagtctcgagaatcgcatccatcgccttcgggcagacgcacgcgcgcgtgtagccgatcacgccgaacaccttcgccacgcgctcctcggcctcgtcgatgtccgcgtccgcatccttcgggacgatgtagatcgtcgactgcatcgaatacacgtcgaagttgccggcacgctggatacgccgccggatatttttcaaaagccggtcctcaaaaacccggcggttcagccccttgaggacgatttcgccgagcttgaccagaatcacttcctgcatatttcaaccaccattccttgatccgcgggcggtcgccgccgcccggccgcacttacgcgtgcgaaagcgtttccatgccgaggcgcagcgcgtcggcaaacgcatcgatttcttctcttgtgttttccgccgacaggctgacgcgcagcgaggtttcgatccgcgcggcgggcaggcgcatggcctgcagcacatggctcggcttcgccttgccgcaggccgagccgctcgagacaaatatgttccgctcggccagaaaatgcagcatcgtttccgcgcgcacgcgccctgccgagaggttcacgatatacggcgaggcgtccgccggcgagttgatctcgaccgcctccatcgcggcgagccgcccgagcagatggtcgcgcaccgcacgcaccgcggcctccgccgcgcgctccggcggcatttcacgcaccgccgcgccgaacgcgcagatctgcggcacgccctcggtgccggggcgcaggttcttttcctgcccgccgccgaagctgtgcggcagaatatgcacgccgccgcgcaccgcgagcgcgcccacgcccttcggcgcgtgcaccttgtggcccgaaacggtcgcgagatccagcccgagccgcttcatcgaaagcggcagcttgcagaacgcctgcaccgcgtcggtgtggaacagcgccggcgcctttttccgccggatgatccccgcgatctcccgcagcggcagcaccgcgccggtctcgttgttgaccgccataacgctgacaagcaccgttttcgcgtcgatcgccgccgcgaatttttcggccgggatattgccgtccccctccggctcgacatagacgacctcgaagccctcccgctcaagcgcctccatcgtgcgcagcaccgcggggtgctctatcgccgtcgtcacaatccggttgccggcgcgccttttggcgtgtgccgcgccgagaatcgcgatgttgtcgctctccgtgccgcccgaggtgaaatagatctcgttcggctgcgccgagagccgctccgcgaccgccgcgcgcgccgcggccatctccttttccgccgcaaagcccatcgcgtgcagcgaggaggggttgccgtagcactgcgtcatcatatagagcgccttttccgccgcggccttggagacccgcgtcgtggcgctgttgtccagatagatttctttcggcatcatttcaaaattctttcgcttataatttccggtagccggtttcaaaatcgaccacgttccgcaggggccgaccagcgcagtacgccgcgaggttttccgccatgatacggatgatccgctcgtgcgtctcctcgagatggaagccgcccgatacgtgcggcgtgatcaccgcgtttttctgcttccagagcgggtggtccgccggcagcggctccgggtcggtcacgtcgagccccgcgcccgcgagctttccgctttcgagcgccgcgcacagcgccgcggaatcgacaatcgtgccgcggccgacattcaagagcaccgcgccgtccttcatcttcgcgatgcgcgccgcgtcgaacaggttccgcgtctgcgccgtgccgggcagcgtgatcgccacgcagtccgcctgcggcaggtattcgtcgagccggtcggtgtggatcagctcgtcaacaaaatcgggcttctcccgccctgcgcgccgcacgccgatcacgcgcgcgccaagcgccttggcgcgcttcgcaaattcgccgccgatgtcgccgaggccgagcacgagcaccgtggagccccacgccgaggcaaccgggccgaggtcggcccacgcgccggcgggctgcgcatccctgtacaaatgcagctttttcaggagcatcagccacacggcgaccatatattccgagatcgcgaggccgtaggcgcccgtcgcattcgtgagtacagcctcccgcggcagacagccgtggatgtagccgtctacgccggcgctcgccgtctgcatccagcgcagccggtccgcggggctgaggagcgcggggctgacgttgccgagcagcacgtcggcccgctcgacgtccgcgcgggtcacgccgctttccttataggtaaattccgcctgcggcgcggccacttctaaaagcgcgcggtgacgcggctttgtttcaaccgtaacgagtatattcatctgcgattcctttccggtgcgccccggcgggacgcactgcttccaagggccgccgtttccgggcggccagccgaaaaaaaacactttacgccatcgtagcacagctttcggcgcgggtcaaccaaaaaatttgcaaagccgcccgcgccgtatccctgtgcggaggtccgcaggccagcctgttccccgctttcaggcggtcagagcgcttcgatttcctccagccagatccggctgcacgcgtcgctcggcatgcggaaatcgccgcgcggcgaaagcgtgaccgagccgaccttcgggccgtccggcaggcaggaacgcttgaactgctgcgtgaaaaagcgccggtagaacgtgcgcagccattttttgatcgtctccgcgtcgtacatccccgcaaaggagcgcagggccattgcataaattttacgcggcgtaaacccaaagcgcagcatataatacaaaaagtaatcgtgcagcgcataggggccgacaagatcctccgttttctgcgcaatctcgccgtccttcggcggcagcagctcggggctgaccggcgtatcgaggatatcgagcagaacgctttgcagcgcgccgccgctctgctccgccgcgtggcgcacgagatggcgcacgagcgttttcggaatcgaggcgttcaccgcgtacatcgacatgtggtcgccgttgtacgtcgcccagccgagcgccagctcggagaggtcgccggtgccgatgacgatgccgccgtgctggttcgcgacgtccatcagaagctgcgtgcgctcgcgcgcctgcgcgttttcaaacgtgacgtccagcaccgcggggtcgtggccgatgtcgcggaaatgctgctccacggcctttgtgatcgggatctcgtcgaagtgcacgcagagctcctccgcgaggcactgggcgttgctcttcgtgcggttcgtcgtgccgaagcacggcatcgaaaccgcccggatgcccgcgcgtggcaggccgagcctgtcgaacgcattcgccgtgacgagcagcgcgagcgtcgaatcgaggccgccggaaaggccgatgaccgccgtcttgcagccgatgtggcgcagccgcgtcgcgaggccgaccgcctgcatgctcaaaatcgtctcgcagcgcgcggagaggtccgcgccgtccttaggcacgaacgggtacgggtccatcacgcgcgccgtctcgatccgcggcagcgccatgcccgcctcgagcaccgtgcagagcggcgcatcgcgccacgtgttcatgcgccgccgctcctgcacgagccgctcggtatcgacgtcgccgtatgtaatgccgtccgagaagagcgcgctctccgcgagcagcgtgccgttttcgcagatcaggttgtgcccggcgaagatcatatcggtcgtgctctcgccaaagccgctgtccgcataggcgtaagccgaaagcaggcggcccgagtgcacacggagcatatcgcgccggtactgcgccttgccgatgatctcgtcgctgcacgagaggttcaaaagcaccgtggcgccgccccgtgcgagccgaacgctcggcgggtccgcgacccacgcgtcctcgcagatctccacgccgacgacgacgtccggcgcaagctcaaccagcacgtcgcggcacgggtaccattcgtccatgaagcggagcataccgctctcgggcgcgggcgaaaagtggcgcgcctcgtagaattcggagtaattcggcacgttctgcttcgcgggcagcgcgagcagcgcgccgcggcagaacaccgccgcacagttgtacagcgcgccgtttgacgccaccggcatgccgaccgcacacaggatgtcgagatccttcgccttttcgatcagcgccatcagactttccccggcactctccagcagccgcctgtccttgaacaggtcgccgcaggtgtagcccgtcacggaaagctcggggaaaacgatggccgccgcgccgttttccgccgcttccgcgatcatccggtacatttcggccgtgttgtaggggcaatccgccacccgcacggggggcgtcgccgccgcgatgcggacaaaaccgtccgcctgccgcttcatatccatcttatctctttccttcctgaaagtccccctgcccgaaaaagagcagggggaaatttttgctgtaaaatcggttctcagcccgcagcaggcgcttcagccgccgagctctccgtgatggcgggctccgggttcggcgagggcgacgggtcgggggtaggggccggcgtaggcgtgggggccggcgtcggttcaggcgtcggggttggctcaggcgtcgccgggacagccgtgggcgccgccgtcggctgctcggtcggcttcgcagtgggtttagccgtcggctcagctgtcgccgccggcttcggcgtagggttttcgttcacgtcagttcccgggccgatgcggtagatcttaccgctcgcaccgtaatacgaggagggcagctcttccgttttcacgacttcgccgtccttgatataatcgcgccacgcctcggcggtgtagccccagttgccgctcgtagagagcaccttctcgccctttttgaggttgtagtccgtcacgtattcgacggtatccagcggcgggatcgagccggtttcctcggaatagacctcgatgctgtcccattcctccggctgccggccgtagaactgcacgtgcagcgtcacgccgtccatccacgccatgatgtacacggccgtgtccagatcgttgcggaactggaaatccagctcgttgtagctcaccgtcgcgtccagaccgatcggcacgtacgacgagggcgaggaatggcactcgcggtcggtgatcgtcatgcccgcgcgcagcgcagcgccgtagatcgtcgaggaggcctgacagattccgccgccgtacatatcgacgagcgcgccgcccgaaaggccgcccgccggcagaaagccggtcgaggcgtttgtggaatcgcccaccgtgtcctcatacgaaaaggtctcgcccggctcgagcaccgtgccgtccacgcgggaaagcgcgagccccatattgtggttgccgttttcggtgttggtggaaaccgtttcgaaatcggcgattttgacaaagtcctttttgagctgcgccgtcgtcaccttcgcggggatcgtctccatcacggcctgcaccgtgccgctcacacccttttggaactgcgcgcagacggcctcaacggttttctgcacatcgagcgttttgccgtccacgctttccgtaaagacgaattcgcccttatcgtaatcgtaggattcaacggccgcgtccttgcactctacgttgaattccgcgctgcgggcggtcagctcctcctcgagcgccggcagcttcagcgtataggcaagctcgtgctcgcccgccttctggtcgcgcagaatgctttgcagcgcgttgtctaaaatatcgatgatctcgacgtcctcgcccgatacctcgattttttcctcgccggccgaaagcgtgaccgtgaggccggcatatttttcggaaagcgccgcgcggcaggccgccacagctttttccagcgtcatgccggatatatcgacgtcgcccatcttggtgccctccggatacacggcctccgtctgaacgggcgcgctgctctcctcctgtgccggcgccgttcggcagcctgcaaggccgcccacaaaaagcgcggcggagagaagcgccgccagcacaagccgccggtctctctttttctccatctcgaacatcctttcacgaagcgcgtcccaccgcgccttatcccgtctatccctccggtcccgcgctttttcggcgcccggccggcctgcttgtcctatagttatagattcattatacccgcggggcgccgggttgtaaagctgaagttcttaaaagtgccttaaaaattccgcatagcgccatgccgcatatggaaatctgcggaaaagtgtggtacacttattttaacaaacgggccgcccggtatgcacgccgggcatgcccccccgcaaaacagccccggcctgcccctggttttttggcgcaggctgcttgcgtgcgaatgtatggaaaggacagcctctgtgcggcaggggctcggtgatttttatgcggatactgattctcacctgtgcgaccggcggcggccatctgcgtgccgcggcggcgcttgaaagctacattcgggagacgaccggccacgaggtcatccagatggatttcctcaagagcatcggcaagctcctcgacaaaaccatctgcgacggctacctgtttatggcgaaaaaaacgccggcccttttcggccgcctgtacaaatccgcgaacaaggacaacaccttcgctgattttgtgccccgcacctccgaactgctctcctaccagcttttcccgcacatcgacgagctccagccggacgtcatcatcagtacgcacccctttgcgaccgagatggtctcgagcctcaaggaggagaaaaagatcacctgccccctgatctgcatcatgaccgactacggcgtgcacaaggcgtggatcgccccgtacgtcgatgcgtacgtcgtcgcctgcgaggacatggtggacgacctcgtgcgcctcggcatcccgcggcagagcgtccacccctacggcatccccgtgcacgacgtgttttttgacaagggcgaccagccaaagctgctgcgcgagatggggctcgacacggacgtgccgaccgtgctcttcatggcgggcagcatgggcgtctccaacatcgtgcagctttacagcgaactgtgcgcctcgccgcttgacctgcagatcatcatcatcaccggcaacaacgagaagctctacaatctctttgcagagcagatccccacatcgccgaaaaagacgaagctcgtccagttcacaaaggaggtcgagcgctacatgcacgccgccgacctcatcgtcacaaagccgggcggcctcacggtctccgaggcgctggcctgcaacctgccgctcgccgtgttcgacgcgatccccgggcaggaggaggacaacgcgaactttttgcagacgcacgacatgggcgtgcgcatcacgaaggacaatttcgccgcggtcatctcctccctgatcgagcacaaggagcgcctgcgccgcatgcgcgagagctgccgcaaattcgataaatcccgcgcgaacgagaacatcgtcgcgctcgccgcgcgccttgcaaaggaattcgcggcctttaaccccgaggtcagcttcgcgtcgcgcaagggccgcttcagcctgcgcgccgccgcggtcattttcgacgaaaagggccgcgtgcttctctccaccggcagcggcatgcggcagacctgcctgcccggcgggaacgtcaccgtgaatgaaaccgccgaggacgcgctcgcccgcacgctgggcgaagcgctcgcggtcgaggtttccgccggccggccgctctggatctgccagagctttttcacaggcggcgcaaggaacgaacgcactcacgagctctgcacctgcttcgccgtggacgccgcgcagacgaacctttccgcgcgcggcgaccgcttcccgggcgcggagcccggcacgcatttcgagtgggtgccgctcgactcgctcgagcaggccgggctcgagccggcgttcctccgcaccgccctcaaaaacctgccgcagaccgtcgaatgggtcacggtgcagagctgaaaacaaccgcaaaagcggcgggcctcccttttttcgggaagcccgccgcttttttgcgcctctttttttctcaccggaatccagatcccgctgtggtagtccgccgcgcggggatctcctgcgtttctattcccgcaggaatctcgccgcccgtgtagtcgcccgcgatccagtgcgaaaagtcctgcgccccctcatccatacagatcccgtaccggccgacggtgcacgccgcgccggggcacgggcaccccggccgcatgcgcctgcacggccgtactgttattataccacacggcgacggcgccgtcctgtccgcgcccgcgtatttttgtccgccgcccggccccgcttcacagcggcagtgcgcccgtcggcagaaaagaccgccccgcactgcgcaggcccgcgacggaaccggacgcagccctacaccaagtgtcccagctccggcgtatcgcgccagtaccgtttcggcatgtgcgttctccggcagacatcgttgcgtcttccttcaatccccaccgtgtcgtaaaacgtccgccacatcgcgcggcagcgctgctctcccggcgattcgggcggcaactcgaccgtatccgcgcgcaggatcgccggctcgccgtccttgtagagcagggcaagcctgtgcgtgcggtcgaagatcatgaaattctcgccggaaaagcgcgagatgaagtgcggcgcgatgaccggcaggacgttgtttttcggctcgatctgcgcgatcagcacgtcgccgtactccgcaaagcgcagaaaccccagaaacaggtgcgcctctcgcccgagaaatttcacggccttgtccagcgtgtggacgaccgggtcggccagcatgccgcataccggccggcccaccctgtagccgagccgcataaaggcgagcatatgcttttcccgctgcggcagacaggtgagaaacgcgcgctcgagcaggtcctgcgcctctagccccatttttttcgggatcgagacgcgcacgcgctccgcgcgcttcctgtccgtctcgatgtactttgcgccgaacagcgcggtctggtccgccgcgtcggccgcacagatcgaaaccgggtcctcatgctcggcaaagctctcgaacacgcaggagagaaagcccatgtaggtgccgtcgtagtagtagattacatctggccggtcagacattttacggaatcctcctttgtcggcgcgaacagcgagagctgctcgggcatttcaggctgaaggccgccctgcggcaggccgcggtcgcgcagggcgccggcgagcacggcggggttatccgtgcggatgcggctgatcgatctgccctgacaggtgatgaagtaattcgcgcgcctgagcacgacgccgagccggcggagcccctcgaagtcgagcttcgccgtgcggcgcgcccgcaggatgcgctttgcgctcgtcacaccgatgcccggcacgcgcagcagcttttcgtacggcgcgcggttgacctccacggggaattcttccgggtggttcacggcccagttgcatttcgggtcgagctgcgggtcgaaatccgggtgcgcgtcgtcgaggatctcgcccgccgtgaagccgtaaaagcgcagcagccagtcggcctgatagagccggtgctcccgcagcagcggcggcgcggtgttcagcgccggcaggctgcggtcctctacgagcgggatatacgccgaataaaacacgcgcttcaatgcgtatttcctgtaaagcccctcggtgagctgcaaaatgcgccggtcgctctcgggcgtcgcgccgacgatcatctgcgtggactgcccgccgggcacgaagcgcggcgcgctgcggtaccgcacgaggtcgtgcgcgttctcgcggatgccgtcccggatgcgcgtcatcggcgcgaggatactctccttcgttttctgcggcgcgaggcgcgtgaggctctcgttcgagggcagctcgatattgacgctcatgcggtccgcaagcagcccgagcgcccggatcagcgcttcatccgcgccggggatcgccttcacgtggatgtagccgccgaagcggtactcccggcgcagaatgtgcagcgtttctaacatcagctcgcaggtgtaatccggcgtgccgacgaccgccgagctcagaaacagcccctcaatgtagttgcggcggtaaaaactgaccgtgaggtcggcgagctcccgcgggcggaacgccgcgcgcgccgtctcgttcgtgcgccggttcaggcagtaggcgcagtcgtaggcacacgcgttgctcatcagcacctttaaaagcgagatgcaccggccgtcgctcgcgaagctgtggcagatgccgcacgcggcggcggagccaatgccgccctgcacgcccgcgcggtcaacgccgctcgaggtgcaggccacatcgtattttgccgcgtccgtcaggatgcgcagcttttccatcgtgtccattctcacccctcctacaccgccacgcccttgaacgggttctcgatgtgcgtgcggcggcgcgcatcctcggtttcaaacagcccgctgtgcatgcgctggatgccgcgctcgatcacgccgtcgccgtacttgcagcgcagaaaatccaccgccgtctcgagcttctgcatccgctggccgtgcgccgcgtcgctgaacagcgagcactgcgtcatgccgagcggcacgagcgacgagacacgcacgccgatgctgcggatcgattcccccgtgtggtgcgcccggaacagcccgtaggccgcgcggaagatactctccgaatcggcgaccgccacatcgagcattttctgccgctggtatgtctcgaggttgtacttgcgcaccgaaagctgcacgttgtagccgctcagacccttttcgcgcaggcggtgcgcgacgctctccgaaagcacgtacagttccgcgcggatctcgccgtcgtcacgcaggtcgtggatcgccgtcgtactgttgctgacgctcttcagcggctcctccgcgccgatgtgcgcgaccggcgccgtgtccccgccgtttgcataaaggctgagctgttcgccgtttttcccaaacagctttcgaagaagcacgcggtcggcgcgcgcgacgtcgccgatcgtccgcatgccgtatttgagcagcgccgcctgcgtcgagcggccgacgaagagaagctgcgccgcgtcgagcggccaaacgagcgcgcggaaattctcccgcgtgaattcggtgacggcgtccggctttttgtagtcgctgccgagcttcgcgaaaatcttgttgaatgagacgccgaccgaaaccgtgagcccgagctcctcccggacgcgccggcggatctcctccgcgatctcgcgcccgctgccgaaaagccgcgtgctgccggtcacatcgagccagcactcgtcgaggccgaagctctccaccatatcggtgtactgcgcgtagatcgcttttgcgagccgcgaatacttcgcgtagcggtcgaaatgcggcggcacgaagcggatgcccgggcacttgcgctcggcctcccagagcgcctccgccgttttgacgcccttcgccttggccagcatatttttcgcgagcacgatgccgtgccggcgctccttgtcgccgccgaccgccatcgggatgtcccgcagagcggggtcgtacagcgtttcgaccgacgcgtagaagttgttcatgtcgatgtgcaggatcacgcggtccacagctttccctcctcaaggaaactttattcggaacatgtgttgcaaatattcgttcgcttccgtctgatttcattatagaacgtgcgttctcaaaagtcaagagggattttcgcccatttttggcatgcggtgcgcacccgcccccaccatcggtgcggataagcgcttctccgcggcggcgcagcaccgcctgcccgagcattttccgcgcgggccgccccaaaacatccgcccgcggcaggatccgcactaagcgggacgcactcggcacacccaacacgcaaagcctcccgcgctttgccggcgggccgcgcgctgtttcgggccgctataagaataaactgtaaatttactattaaagaacttgcggctttcttgaaaatcaccggcggccgcattatactaatgaaagtaacatttcaaaggagcgtgttctcgcgtgtttttggaaaaactgagacgatttatgtacgggcgctacggaacggatacgctgaatctcgtcctgctcatcgccggccttgtggtggcgttcatcgcgcagctcacgcgtttctggccgctgaccttcgtcgcctacgcgctgtacatctatgcgatcttccgcatgctctcccgcaatacagcccagcggcaaaaagaatattattcttttctaaaagtgtggacaccgctgcaaaaatggtttagaattaggaaaacggcgtttcgggagcgcaagcagtacaaatacttcaagtgcccgaactgccgccagcagcttcgtgcgccgcgcggccgcggaaagatccgcgtcacctgccagcgctgccgcaaggagttcaatcaaaaaacctaaaaaacggaggagtaggaacagtatgaaagcagcaatcatcggcacatggcatgtgcacaccgaagaatacacccgggcgatccttgagaacccgaaggcggaggccgccgttgtctgggacagcgacgaagcccgcggcaaggcgttcgccgaaaagatgggactgccgttcacaaacgatctcgacggcatcatgcaggacggcagcatcgacagcgtcgtgctctgctcggctacctgcgatcacccggcgctgctgcaaaaagcggccgccgcaaagaaaaacattttcaccgagaaggtactcaccatcggcgtagaggacgccgtggccgcagccgaagccgtaaaggcctccggccgcgttttcacgatctcctacccgcaccgcacgttcccgacgctccgcgccgcgaaggcgatgctcgattccggaaagctcggccgcatcacctatgcgcgcgtgcgcaatgtgcacaacggcagctccgccgattggctccccccgcacttctacgacaaggcgcagtgcggcggcggcgcgatgatggatctcggcgcacacccgatgtacacgctttactggctgctcggcgcgccgaaggcgatcacctccacgttcacgcaggtcacgaaccgcggcgtcgaggacaacgccgtttcggtcatcgagtttgaaaacggcgcgatcggcgtctccgaaaccggcttcgtctccgagtgcaacccgtatacgctcgagatcagcggcacggacggcgcgctgatggtccacggcgagaccgcacagtggggcggcaaggccaccggcggcaagtgggtcgacctcgagctgcccgaaaaggcgccgctgccgatcgaccagtgggtcgacgcggtaaccgatggcacgcccgccccgtccacgatcgacgaggccgtcatgctcacccgcctgatggacggcgcatacaaggcctttgagaccggcgcgaaattcacgttctgattcggcctacgggagggttatctttggataaggacacaagaccggaggcgcgcccgctggacagggccgccgcaaaatccttcgtaaggccggccattgccgtctcggcctttaccatcggcctgatctacgtgctgttccgcttcgacagcctgatgcacgtcggcggcgtgctgatgaatgccgtcggctccttgatcgccggcttctgcatcgcttatttcctgaatgtctttctcaacctctttgagaatttcattttcggccgcctgacgcgcgggacaaacaagctctggcacaagatccgccgcccgctgtgcgtcgtgctctcgtttgcagtcgtcattttgatttttctcgccgttctgctgtacatcgtgccggagatcttccagtcgctcgagctgatcggcaaaacggcccgcgtcaatatcccgatctatgtgcagacgctgacgaagtggatggaacagatctccgtcgagttcaacctcgaccttgtgaacagcctcgattttctcaagggcttcaactggacgagtattttgaccggcgcgacggaattcacctcgaatctcgtcggctcgctcgtcaacgcgacagtcaacgtggcgagcggtatcttcacattcatcctcgccatcatcttctcgatctacttcctgatgggaaaggaaagccttctgctctctctgaagcgcgtcgtctactcgtttctgccgaaaaaggccgtggcgacgatcaccgatatcggtgtgaccgcaaacaacgtcttttcctcgtttgtgcgcggccagctcaccgaatgcgtcatcctcggctgtctgtgcttcatcggcatgtcgctgatcggcttcgattatgcgctcctgatctcctgcatcatcacgatctcggcgctgatcccgatcctcggcgcctacatcggctgcggcatcggtgcgtttcttctcctgctcgtcaacccgatggacgccgtgtggttcgtcgtctttatcatctgcttgcagcagtttgagggcaatgtgatctacccgaaggtagtcggctccacgatcggcctgccgggcgtatgggtgatgaccgcggtgacggtgtgcagcaatctgttcggcatcatgggcatcatcatcggcacgccgcttgcggccgtgatctacacggtggttcggcgcatcacctcaaaccgcctgctgcaaaagaacctgacgaacgacgacctcgcgccgggcaagtacccgtatctcgaggaatcgcactacgcgagccgctctagcggccgcccactgagcgcgcacgtgctcgagcagtcgcagcggaagaaaaaggcaccaaagcccaaaacccccgatttcaaaaagatcttcaaaaagaaataaacgaacagggcgcggccgcacaaatgcggttcgcaccctgtttttgtattcctgatttttattttcgcgccgtctgctttaaagccggcggcaaaacggatcagccccacccgggcggcgccgcgtaataggcgctcgtctcgctcttttcggagatccagccgctctgcgcgccgtcctccgaaacgacgtgcaggtacagcgtgccgccggccagcgccagctgatccggcacatagacggtaccgaccgaggccgtgaacgcttcgaggccgccgcccggctccgcatacgccttaaacggcgtgtttgccgcatagaacggcgcgagcgaagcatccacgcgcaggccgtagacctgtgtttccgccgccgcaaccgatacgccgtcatacgtgtaaggaatccccacgtacatactgccgaaggacgggctgtgcaccggcgtatccgcccacactgtgaacgtgccgtcgctcgggaattcctgcgtgctcttgcggtacacagcgccgcgccccatcaaaatcgggatgctcgtcagatctgcaagcggcagcggcgcaccgtcccgccatgtggaaagcgaataagcgccgagcgtgtagctcgcctgcatcgtggagaagcaaagctccttctgccggtcggccgcatcgatatcgacaacccagagctccgcctcaaagccgtcgccctgcgcggccggctggtcgttgatcagcagcgtgtagcttgtaagatactcgcccggctccgcggcgaggtggatccgctcgtttacgccgtcgccgtcgagatcatactcgtgcgtctcgcccgcagcaatcacggccggttccatcggcatggcgggcgcgggtgtctccgcaggcggcgcctcggtcgcctccacgatcggctcctgtgtcggctgcggcatctcgctcggaaacgccggctcctgcgccgcactgctctccggcgcggcagccgggatattctccccgccgccggaaagccccggcaggataaactgcacgagcacaaagatcagcatcgcaagcgcggccgcgccgccgatggacgcgccgaggatcaccggcagccgcccgcccctcttcttttccgacatcgcagccggatgcgcatacggtccgcccggcacgtgcggcgccggtatcggcggttccgaacctgccggaggctcaggcgcaggccgctccgcagtctctgcggcgggtacttccgccgcgggcgacggcggggccgtcacgataacgccggcaggctccgccgctttcaccgccgcagatgcggtcggttcttctgcgcgcgccgcactcgccggaggctcaggcactgccgcgccggattcaggcctttcgcaagccgttttcggcgcgttccccggaacctgtaccagcggcaccggagccgccggcctcccctgcggctttccgcagtgcacgcagaacgctgcccccgccgggatttctcttccgcaatgaatacaaaacatcaacgccactccccctcatccagccggcgcagcatccgcgcgcaggccgcctcgaagcctctttgatttttaatatagcacactttttggaacaaatcaatgcacgagaatctcttctgccacagaaaaccgcaattcaaatcaggattttccctataggctgtgttataatggcagtaaacgcagcttcaacgcttatttataagccaatcatacgctgttctcctctgccgcagtccggacattacaatcgaagggaatgatccccattgtctgcacagacgatcaccgacatgctcgattggatcgagctacatctcgagcaacccattaccttgccgcacatttcggctattccccctgctattgctccgcacagctgcgcgcccacctaaacgtgccgtttcgcatttacctgacgtcaaggcggctcgccagtgccgccgaggccttgcgaatgaccaaccggcgcattctcgatatcgccgtgcagtatggcttctcctcacacgaatcctttgcccacgcattccggcgcgcctacgggcgcacgccgagcagctataggcaacaattccgccacggctcccgaaagaaggcgatttcttgaaaatacccgagcgcaacgcgccctgctggtgcggaagcggcagaaaatacaagcggtgccacctcggctttgacgagcgtctcgaggccctgcatcggcagggcttcccaattccgccgcaagcgtgcatcaaaacaccagcacagatcgagggcattcgaaaaagtgcctccgtcaacacggctgttctcgattatgttgcggcgcacattgcgcccggcgtttccacggcggaaatcgacggctgggtacaggaagaaacgcgccggctcggcggtacaccggcgccgttgaactacgagagcttctcaaaaagctgctgcatttcggctgacgacgtggtctgccacggcattcccagcgccggggaacttctttgcgccggaagcatcgtgaacgtagacctctccaccgagctggacggattcttttccgacgcctcgcgcatgttctgcatcggcgcggttcccgatgaaaagcgccgcctgacggaagtggccgcggactgcgtgcaggccggacttgcggcagctcgcccgtgggggtttctcggcgacatcgcctcggccgtacagctttgcgctgagcgggcaggcttttccgtcgtgcgggaaatcggcggacacggtatcggcctcgcctttcacgaggagccgtgggtcggctacaccgcgcctccgcataccggcatggttcttgcgccgggcctgtgctttacgatcgagccgatgattaacatgggatctccagaaatcaccgtggacgcgcgggacggctggactgtccgcacacgcgacggcctgccctccgcccagtgggagattcaggtgctcatcaccgaaaccggctgcgaggttctcgcacattgacgccaaagcgcttgattttaccaaaaagcgaaccccgcacggcggcaagcgcgctgtgcggggtttcgcttgggatattaaatcatcgtgaaagatggcgaacgctttttcagttctcgctgacgatccggtagtagaccttggcggtcagcgcgtagacaatcgcatagaacacggcaaacacggcgaaggtgacggcggtgcagacgacgaacgtcgtgacctgctgaagcatcatcgcgcgcaggatgcagttgataatcgggaaggcaaagacgatgtggatgccggcggtgatcagcggcaggaaaaacaccgtgaggatctgcgaatggatcgagcgctttgcctcgctttggctcaggccgaccttgcgcataatcgagaagcgcgtcttatcgtcgagaccctcggagatctgcttgtagtagatgatgagcaccgcggccatcgtgaagagcaggccgagcgcgatccccataaagaggaagctgccgtacatggcgtagacgtcgcgctcgttgtccacgcggcactccatgctccagccgccggtgaagtcctcatccgtaaatacactgtcccagcccgcttcatacatatccgcaaagtatgcggactgctccgcgtcggtcatatcgccgaggtcggcgcagtaggccgtgcggctgttttccagacgctgtgtaaggtcgatgcgggcgaggaacgcctcgtaatccggaatcaccagcacggaggcttcggcaatgttggccgatacctgcccgcagatcggaaaggtttcgggcggcttcaccggcgtgtacgccttgccgaacagctcgagcgtaccgccgccgaacgcctcgccgctgtttaaaaaggccatcgcctcattatccgtgagctctgccgactgcccagtgatcgcgttgtactggctgagcggcatcaccaccgttttcaggtagctgctcatcataagcccgttcgtcgcgttgtcggtctcctctgaaatcacaaggctgcttcccggttcatataccgctgtaaaggcgctgtaaacgtaccgctgccatgtaaaatcggggtgcgccgccatttcctcctcaaaataggcgtcgaacgcctcggtcagctcgtcgccgtagacgtaagccatcacgtcgtgcgggtagcggctgtggatcatcccgcctgcgccgaaccacagcgagcaggtggacgagatcgtgacgagcaccatcgtcgagaggatacagatgttcgcgaggccgaccgcgttctgcttcatgcggtacagcatgccggaaacactgatgaaatgctgcgttttatagtagtagcccttattcttgcgcaggattttcagcaccgcaatgctacccgccgtaaagagcagataggtgccgacgatgacgagcagcacggcggcgaaaaacgacaggatcgcaacgccgacctcctgtgcggaaatgatcgacagcgcgtagccgccgccgaggcacgccgcgccgagaatcgccataaaaaccttcgttttcggctcgcgctcgccgacgctgccgccctgcagcagctcgatcggcttcgcgcgccagacgcggaaaatgttcgagaggcagatcagaaaactgaccgcggcaaacaggatcagcgtctgcacgatgctgcccgtggaaatatagaagctcagggaaatttcaaagccgatcagcttcgcgacaagcaggtagatcagccggtcgagcagcatgccgatcccgatgccgcccgcaagcaccacaagcgcggtaatcagcgtttccagcccgatcacacgggcgatgtgccccttgttcatgccaagcacgttgtaaaggccgaattccttttttcgctgcttcatcaaaaagctgttcgtgtaaaacaggaagatcacggagaaaatcatgacgatgctcacgccgagattcagcatcgcgttcgtcatctcccccaggtcggggttattggcgagggagtgcagaatgtagtagacggcggcggtcagaacgccggtgagcatgtacggcacatagctgcgccggtgctttttgatgttctgccccgccatgcgcatgtaaagagaattcatttcggcgctcctttcaggcttcggccgcgccggacgttccggccgcaccgggcgtcccggtcgccatcgtcgtgagcgtatccgaaatgcggcggaacatctcctcgttcgtcgcgccgccgcggtagagctggtggaacacgacgccgtccttgatgaacagcacgcggctcgcgtggctcgcggcctttgtggagtgcgtaaccatcagaatcgtctggccgtcgcggttgatctcgccgaaaagcgagagcaggctgtccgacgcgcgggaatcgagcgcgccggtcggctcatccgcgaggatgatctgcggcgatgtgatcagtgcgcgggccacggcggcgcgctgcttctggccgccggagacctcgtaggggtatttcgcgagaatatccgaaatgccgagcttctcgacgatcgggcgcaggcgctggttcatctccgggtagtgcttgcccgcgagcacgagcggcaggaagatgttgtcctgcaaagaaaacgtgtcgagcaggttgaaatcctgaaacacgaagccgaggttctgccggcggaacgcggcgatctccttttcgccgacgctcgagagcgcgcggccgttcagccagacctcgccctgcgtcgggcggtcgagcgccgcgagaatgttgagcagcgtcgtcttgcccgagccggattcgcccatgatggcgacgtactcgccgcgctccaccgcgaacgaaacatttgtgagcgcctgcacgcggttgccgccgaagcgcgtcgtataaatttttttcagaccattgacttccaatacagccatttctgaaaatctcctttctcaaaccgggtttctgaatctgtacacagtataccgcatccgcgcggcgctgaacatcgattcaccttacaaaacgcgcccttgaccttacatttttgtcacacggcctgtcacatgccgtttccgcgcagaaaaacggctcccccgcggggagccggacaagccgcacggaagccgcggcctttattcgacgccgaggtccgccgagcgcagatcgacggagaccgtcgtgccccgcccgggcgcggactgcaccgcgatccggtgcccgagcttttcggcggcgcagcggctcaggtacatgccgaggcccgtcgatttccgcccggcgcggccattgtagccggtgaagcccttttcaaagatgcgcggcagatcctcgggtgcgatgccgatgccggtatccgaaacgctgagcaccagctccttcgtgacgcgcaccgtcaccgtgccgttttccgtgtattttaccgcgttcgacagaagctgcccgaggatgaacgcgagccatttctcgtccgtcagcgcgcggaccggctcgatctcgcaccgcagcgcgatgtgccgccgcacgaactgccccgcgtattgccgcaccacgcgccgcacgatcggctcaatttcaaagcgcgcgagcacaagatccgtcgtcgggctttcaagccgcgcgtaggtcagcgccatctcggcgtagcggtcgatgcggaagagctcggcgagcagctcacggctgcgcgcgtcgtcctgctcgcgcaggatgagctgcatcgcggcgatcggcgtcttaatctggtggatccacatcgtgaaatagtcggcgctttcgacgagctggcgctggcggtccgtctcgcttttcgcgagcatggcgcacagccggcgcagcgcctcgtcgtacaattcttccaccgcgccggacggcgcgcgcagccgttccgccgattccggcagcgcctgcatcgcgagcgccagtgcccggcagcgcctgcggtaccggatgtatccgggcagcgcgcaaaaaacgccgcccgccgcgcagagcaccgccgcatacagcaccggcatggccggcaggccggagaggacgaacacagcggcgaaaaccgccgcggccccggcgatatacagcgcggcgccgccatgcgcccggatataggaaaacaggatctgccgctcgttctttttcatccgcaccctcccccgcagggcggcccgaaagcccccgcgctcattcaatgatgtatccgctgccgacgcgcgtcgcgatgtaatccgtgagccccaccgccgcgagcttcttgcgcagccgcgtcacgttgacagtcagcgtgttttcctccacatagaggtcgtactcccacaggcgcgtcatcagcgtctcgcggctgacgaccttgccgcggctctcgagcagcgtctgcaaaatgcggaactcgttgcgcgtcagctccgtcttttcgccgccgcacagcagcgtgccgtcgttgaggttcagcaccgcgccccggtgctcgatgaccggcacgcggtcgccgaggtcgtacgtgcggcgcagcagcgcgcggatcttcgccatcagcaccgaggggtcgaagggcttcgcgacgaaatcgtcgccgcccatgtcgaccgccatcacgatattcatattttccgccgcgctcgacacaaaaagcaccggcaccgccgagatctttcggatctcgctgcaccagtggtagccgttgaaaaacggcagcgtcacatccatcagcacgagatgcgggtcgtactccgtaaattcgcgcagcacatcgcggaaatcgcgcacgcagcgcgacgccatgccccacgattccaaaatccgggtgatcgctccggcgatcgccgcatcgtcctccacaatcagaatcttatgattttccatcccaattaccaagccttttctgtggtatcgcggcccgcgcaggcaaacgcccagcctgcacttcaggcagggaaaagccgccccgtgcgccgcgcctcgttcacgccccttattgtaccacaatttggccccgatgaatttaacaattttcttaaaaacgcccggaaggcactttgcggcaagcgcttccgggcgtttcattctaattcggccggcgcaaaaatcaaaccgcgctcgagcttccagcgcaggatgcgcagcacgctttcgtcgatgcgcgcctcgctgatcgtgccgtcctccacggcgcggacgaccgccggaatctgcgtctcaaaatcggtgcagcagagcatgtcgttgccggcgagcaccgccgcgaccgccgccgattcgccgtctgtgtaatcggtcacgccgcccatcgagaggtcgtcggtgatgatgacgccggaaaagccgagcgtgtcgcgcaggaccgcatgccacgccgcggagagcgacgcgggcgcctcgccgtccacacaggggacgatgttgtgcgtgacaagcacgcagtcggccccggcgtcgatgccggcttcaaacggcagaaatgcgccgccctcaaacgccgccaagccgcggttatcgtacacgacgcctgcgtggctgtccgccgcgttgccgtagccggggaaatgctttaaaacggtgccgacgttctccgcctcatacgtgccgacaaccgcgccgaccgccgcagccgtatccgccggagaaaggccgagcgaccgcgcgtacatgaacgatgccgggtcgtccgaaatatcgcagaccggcgcaaaattcacgttgacgccgaggctgagcagcaggcggcacttttccgcctccgcggcgcagagcagctccgtgccgcccgcgttatagagatcgcgcatggaccagtacggctcatccgaaagctgcgggttatcgctgatgcgcacgacctcgccgccctcctcgtccgcgccgaccaacagcttgatcttcgccgcgctctggtacgcttcgatcgcgccggtgacctgcccgcgcgaaaggccgtcaaaatcgcggccgaacagcagaataccgcccggctgataccgcgcgaccatctctgcgccgtccgtttcggggcaccgcacgaaaaacatctggcccaccttttcctccgtcgtcataccctgcaaaagcagctcctccggcgcgggcggcggggttggagcgggcgaaggcacgggcgtcgttttcggcaccgcaccgaccgcggcctccggtgcaggcggcggcgtgggggccggctctgccgccgcgccgaccgcctccgccgccgaagccgccgcttctggccgcacgcccgccgcgcacccgcacagcacaaggcacagggcgagcagcacggcgcaaagtctcccgttttttcgcatccggcgtcctccttgttacagacttctcaggtactgcgccgagcgctccatgtcgcgcagctggtccgccgagccgaaatgctcggcggcaaacacgccggtgtagcccgacgccaaaatcgtctcgaccatgccggcgatgtcgagatcgccgtcgccgacagccaccgggtacatcgcgcggcccttgacggtgatcttcggatcgcccgcattcttcgcccagccgcggtccttgcagtgcacggccgcgatatagggcaggaaatcgggcagcaccgccgcggcgtcctcctcgctgtagaggaaattgccggtatcgaagccgcagcgcaggcccggcacgttttccatgaaccagagcagctccgccgccgtggaaaacggcgcgttgtcgccgtcgaaatcctccatcacgaccgtaaccccctgcgccgccgcaagctcgatcagcacgccgagcgaagccgccatcgcatcgcggcgcttcgcgtaggccgcaccggcgcggtccatctccgcctccgtcagaaagcccgtgacggcgagcaccttgccgcattttgccgggccgcacaggccgacaacgcgctgcgccatcgcgcggtccgccgccggcgagctctccgcgccgccgaagtcgaagaaatagtagatgcagttcacgccgagacccgccttttcgagcaccggcagaatcgtttcgccttcctcaaacaggcgcttcgcgtcgatctccacgagatcgtagccgaagcccttcaccttcccgcacacggcttcgagcggcaggccggtctgcgccgccgcgtccgcgatgtgctcgtaaaaaatagacagctgatttttcatcatacaacaactccctgtaaatttatatgcaggccgcccgaacgcggctctgttcccgttttccaatgcgcagtgttcagccctgcggcagcaccatgccgaacacgtcgccgagctcctcgagcagagcggcggtcccgccgtcaaactgctccggccggtaaacgatgaccgcctgaaaataatagccgcccccgcgcgtgtcgctgtacagaaccgcgctgctctcgtgcacgccgtcgcccgataccgcgcgcgcctgctgcacggcgatgtcatactccgcgtggtactgcaccgcgcccagcgcctcgagcgtttccccgttttcctccagcatcgcctgataataaagcgccagatcttccatcgaggtttcggcagtcgccaatgcgccggcttcaaaaacgcgctctaaaacggaaattccgtgcgccgtgccgagcaccgcgtatccctcgtcccggtaggcgatcgagccgccgtacggcaggtacgcgtccacaaacgcgccgtagttctccggggccttcatataggccacgccgacccaatcgtattcgggcgccggcgcaaacagcgtctggtagttttcctccgtgatctccaccgtgccgggctccggcgtcacggggacctcgggcagatccggcggcgcggcagtcggcagcgcctccacgcccggcggctccgtcggctccggctccggcgtgaataccggcgcggacggcgccgcggtgcggttcagcacagccgccagcgtaccgcagcccgaggcggagagcagcatcaccgccgcaaggccggccgcaagaaatcgcttccccttatttttctgcatgaccgtttcccttcccccgtccggccgaaaggccgcgcttctgccgcgcggcgcgggcgggtgcttttcctttagtatagcaggccgcgcgggtttgtcaacaaaaatcggccggcgcccgcagaaagtgggggcaccggccgatttcagctcaatagcggttgtcgaacacacgggtcgattttttctcgctgcgcggcagctcgccgatcgccaccggcttcgggacgatcgtcaggccgaccttcgccttgaacgtgcgctgcacgtcgagcgcgacagcgtcgcggtccgcgcccgcgtccgtctcgaagaacagcgtcatgatgtccttgccgtacaggtggtcgatcatcacctgatactcgctcgaaacgcccgggatgtcgcgcaggacgtcctcgatctgcccggggtagatgttgacgcccttgaccttgaccatgtcgtcgctgcggccgatcaggatgtcgatgcgcgggaatttcgagccgcaggcgcattcgccggccatgatgcgcgtcaggtcgtgcgtgcggtagcggatcagcggcgcgccctgctttctgagcgttgtgataacaagctcgccgtattcgccgtccggcagcaccgcgccggttttcgggtcgatgatctcgaaatagacgaaatcatcccagtaatgcatgccgcactggtgcgcgcagctcatgccgatgcccgggccgtacacctcggtgaggccgtagatgtcgtacagctcgacgccgagctcatccgcaatgcggcggcgcatcttgtcgccccagcgctcgctgccgataacgccctttttcaggcggatcgtatcgcggatgccgcgcttctcgatctcctcggcgagcagcagcgcgtaggacgaggtggcgcagagcaccgtgctccccagatcctgcatcatgcggatctgcttgtcggtgttgcccgggcccatcgggatgaccatcgcgccgagcttctccgcgccgttctgaaagccgatgccggcggtccacaggccgtagcccggcgtcacgtggatgcggtcgcggttcgtgatgcccgccatctcgtagcagcgcttgaaaagctccgcccagtcctcgacgtcctgccgcgtgtaggggatgatgaccggcgtgccggtcgtgcccgaggacgagtggatgcgcacgatctcctcctccggcaccgcggcgatgccgagcgggtatgcgtcgcgcagctcctccttgttcgtaaagggcagcttttcaaaatccgcctgatcgcggatcacgtcaataccgtcgaatttcttctggtaaaagccgccgggcagcgccttgaggcggcgcatctggctctggatcaggccgagctgttcctgtttcatcatcataatcgtcaagtcctttctggtttcaaagcagcgcgcccgcggcggcgagcgcggcggcgatgagtgcggcaaaaagatcgccgcttttaaatgtatagcgccggctctggctctcccgcgtccgcagcgtgaagccgcgcatttcggcggccgccgcggtatcgtgaatgcggcccactgaggaaatcagcagcggcatgcacagcgggaggatcaggcccagcttcttaaagggattcttcgtgtcgaacgcgacgccgcgcgcggtctgcgcctccatgatgccggagagcgaatccgcaaagaccgggatgaagcggatggcggtcgtcagcgtgaaagcgtatttgtacggcacgtgcaggcgctgcaccagcacgccggagaggtcgctcatctgcgtcaccgagagcagcagcgcgagcggcatcgtcgcgccgatcagcctaaggacgaggcgcaggccggtcatcactccgcggtcggtcacgaggagcggcggcagcgaaaggagcggcgtgcccgtgcgcacgaacaggagttgcagaacgaacaggaaaaccgagattttcagaagccccttcagcatgcccgccgcgcggtcgaacacgccgccgagcgcgccgagcagcaggtcgcagccgatcaggaacacgagaaacgcggggttttccccgagaaagcacgcggcgcagatgcagaccgagagaaagatcttcgtcagcgggtcgagccggtgcagcaccgaatcgcccggcttgtaatcgagaaagcccttcatgccgacaccccctttttccgcgccgcgcggactgcggcctccatctcctccacagtgtccgccggcggcaggcagtccgcaagccgcagcgagagctgtgtgatctgcggcggcaggacggatgcctgccggagcaccgcttcattccggaacacggcgcgtgtttcaccgtcgagcagcagcgcgccgtcccgcaaaacgagcacgcgatgcgcaaaatcgagcacgagctccatatcgtggcagaccatgacgaccgttgtgcccgccgcgttgagcgcctgcacgcgcgccatcatcgccatgcactcgcggtagtcgaggccggtcgtcggctcgtcgaggatcagcacctcgggctcgaccgcgatcagcgacgcgagcgcgacgcgctgccgctcgccgcggctcgccgaaaacgggtcgcggtccccgtccagcccgaacgcttcgagcaccgcttcggtgcgctgcgccgcgtcttttgcgccggtcagcgcaaggccgaaccggatttcctcccggatggtcggcttgcagagctggcggtccggattctgaaacagaaagccgatcttcttcgcgagcgcgctcgtgcgcagcgacgtcgtcggcacgccgtccacgagcacccggcccgccgtcggcttcagaaggccgttcataagcttcgagaccgtcgtcttgccggcgccgttcgcgccgaccagcgcgacgaattccccgcgcccgaccgtaaaactcaagtcccgcaccgcggccgccccgccgtaggacagagaaacgttttcgaattggatcataccaccagcccccttacaagcgcttcggcttcgtcgaggtcggcggcaagcgcgccgcctgtcagatcggcgaggcggtttgaaagcgtcgcgacacgcggacagtgcacgccgatagcttcgagccgcgcgctgtgccgcagcacctcgcgcaccgggccgaacagctcgagccgcccgccgttcagcaccgcgagcttcttcgcatacgccgaaagcagcatgatcttctgctcgacgacgatcaccgtcatgccgtgctgctcgttcatccgccgcagcagacggaagatctgctcggaggcgccggggtccaactcgccggtcggctcgtcgagcacgaggatcttcggccggagcgcgaggatcgccgcgacggcgaccttctgcttctgcccgccggagagcgaatcgatcgcccggtgccgcagcggcgcgatgccgacgtcgccgagcgcttcgtcgatgcggcgcgggatctctgcccggtcgacgccgaagttttcgaggccgaagaggatctcgtcctccacctggcccgcgaccatctggctgtcgatgtcctgaaacacgctgcccacgtgcagcgcgagcgcggtcaggctgctgtccacggtatcgacgccgttcacggtgacgctgccgaagaagtcgcccgcccggcggtgcggcacaaggccgctcagcgcctgcgtcagcgtcgttttgcccgcgccgctcggcccggtcacgccgatgaaatcgccgtccgccaccgtcatgtcgatgttgtgcagcgcgtctcggctttcgcccgcatagcggaacgaaagcccgcgaatctcaatcatgccgcgcctcccgcttacgccttgagcgccgcgcgcgccggcacgtacagcacgccgacgatcacgcagttaatcagcgccgtgcacaggacgatcggcacatacgccgcgagtgtttcggccgcggcgccggtaaacgcgaacaggctcaccgtgtacaggccgcccgaaacgagcgttgcgaggaaggtggagacgaccgaggagatgttgcgctgcatcgggatgcggatcaaaaacgccatcacgagcgcgcccatgatctccgagataaagttgatgtacggcgtgcccggaaagaactggcacaccgcgccggccagcacgccgatgaccgccgcgcgcgccagtgtcggccggatgagcagaatcgcgaggcagtacatcgcgatgatgaaattcggcttcatgccgccgatgttgatgacggagcccgcaaagaacttgagcaccgcaccggccgcaagcaaaacggccgtgagaatcaggctgcggatctccgccgcgctgccgctttccgatttgacgactcttttttccgctgttctgttttccatgattcgaaacccctttcgtgccaacggcacatttaaaattgtttcgttggccggggtgttcataatccccacttggagcgtgcaaagcggaatcccggaaaataaaaaaagccttatatatgcatcactgcacatataaggacagaaaattttctgcggtaccaccttacttgacgccggagcgcccgctctaacaaaaatgccaacacattttctgccagtaacgccggcacgcgtcgcagctactcgtcgcctttcgccttgccctctgcggtccatttatcggtcagcatttccgcaggactctcaccgccgcctgctctctgtgggcgcttcatacccgacttgatctccgcttcataggtttatgttatgaacttgtttgtattttattgcaaaacgcccgaaaagtcaagacttaaatcaaaatttttttgtgcgccagaaaacgacacaaaggaaatttgtcccacccgtatactgtatgcgaagggaggcctctgtgtgaccgtctacgcggacattctgtttattgtaaatctgtacatcgatgcgatgctgcttgccgccgtgcggcgcttcctgcggctgccaatcaaaacatggcgcctgctgctcgcggcggcactcggcgggcttttcgggctttcggcgcttctgccgcacatcggcggcttcccgcttctgctgctcggtctcgcgcaggcgcttgcgctcgcggcggcggccttcgcgccgaagccgccggcaacgctcctcaaagccgcctttctgcttctgctcttcggcgcggcgctctcagggcttctgagccttctgccgtttcacggcattctgctcgcaaacggcgccgtgtacttcgatatctccgccctgctcctgatcgcgctgacctgcgccgcctacggcgtgctgtaccttttcgaccggcttttccagaagcgggagccggacgtgcttttttcaaccgtcacggtctccttctgtggaaaagaggcgtcgctttccgcaaaggttgataccggcctcacgctgcgcgagccgttttcgggcctgccggtcatcgtcgccgagcgcgccgcggtcgccgcgctcctgccgcccgatttcggcaaccctgcaacagcgccgcccgagggactgcggctggtcccatattcgtcgctcggagcggacggccttctgcccgcattccggcccgagcgcgccgtgctcggcggcgaacccgtctcgtgctgggtcgccgtttccgaccggccgctctccgccggcagcttcaacgcgctggtcggggcttcgctcagcaccgtaaacgccgggaagcgcgccgcttccccaagggaaagagaggacaccacatgaaccggatcaaaaggcttctgcaaaccgtacagctctgctttgcccggctgctgctcaagcagtcaccggaagcgtgccactacataaacggccccgaaacgctgcccccgccgctgacgcgcgaggaggagcgccgtgttttcgaggacatccgcgcgggcaaacccggcgcgcgcgacccgctgatcacgcacaacctgcgtctcgtcgtctacatcgcgaagaagttcgagtctcccggcgcgaacgtggaggacctgatctcgatcggcacaatcgggctgatcaaggccgtgaacacgttcagcgtggagcgaaacatcaagctcgcgacctacgcctcgcgctgcatcgaaaacgagattttgatgtacctgcgcaagagcgcgcagctaaaaaacgagatctcgctcgacgacccactgaatgtggactgggacggcaacgagcttctgctctccgacctgctcggcagcgaccccgacaccgtgaaccgcgatatcgagcaggaggccgaaaaacaggtgctgctcgaggcggtggaccgcctgcaaccgcgcgaaaagcagatcatggaactgcgcttcggcctgaaccaccggcgcgagcacacgcagaaggaggtcgccgacgtgctcggcatctcgcagtcgtacatttcgcgcctcgaaaagcgcatcatcgagcggctgcggcacgacctcgaaaaggtgagctgactccccgcacacgcaaaaagagagcctttaaggctctctttctttgtttttcagcgcggctgcgccccggattcattcctcctcggcctcctgcggcgcgtagaacgcgtcgttgcgcgcggcagcggcgagctgcatcgcggcggctattttgctcaccgcaaagcacagcaggaacgagagcgccatcgcaaggcaggcgtagagcgggccgttcggcgtcgtgaagccagaggccgccgcagggatgaaggcggttaaaaagccgccgagcatgccggcccacgcgcccgcgcggttgatgcccttccagtagagcgacagcagatacggcgcgaggaaggcaccggatatgatgccccacgaatacgacatcatctcgaggatcggcgtcgggtaatttgcgatcaggtagctcatgacgacgaacagcaggcagagcacgcgcgtcagcgccgtcacgttttcgtcgcgcatatttttcgcaacggatttcttcacgaggtccatcgaaaccgtggagcacgcggtcagcgtgatgctcgagagcgtcgaaaccgatgcggagatcagcagcacgaggatcacgccgatcaggatattcggcaggcccgcgcggtcgagcatcagcggcacgatgtagtccttgccgcccgcgggcatcgcctcgccgaaaaagaggtgtgagagcgagccgatgaaatagccgccgcccgcgacgagcagcgcgaaaaaggtggagatcacgatgccgcgcttcacctcccgacggtcacggatgccgtaatacttgtggatcatctgcggcaggccccatgtgccgaagctcgtcatcagaatcgtcgcgatgagcgacaccgctgcgtccggctcaagcggcagcatttcgtgcgccgccatgtagtccgccatattcgaaagacccgccgcgaggccgccgacctgcggggacagaacgacgagcacgatcagcgccgcaacgccgaccatcataataaagccctgcacgaaatccgccttcagcgtcgccatatagccgccgagaatcaaaacgacggccgaggcgatcgcgatgataatcatgcagatctgctcgtccacgccgagaatcacggagcacacgctcgtcagccccttatagaccgaggcggagtacgggatcaaaaacacgaagatgacgatgcacgagaaaagccgcatgcccgggcttttgaagcgcatttcaaagagctgcggcatcgacttgatctgccagcgccgcgtgagcacgcgcgtcctttccgcgagcacgagccaagcgagcagcgtgccgaacaccgcgttgcccacgccgacgagcacgctccacaggccgaagctccacccggagccgcccgaatagccgatgaacatgaccgcggaaaaatacgcggtgccgtagctgagcgcggagatccacgcccctgcgctgcgcccgccgaccgtgaacgactccatgccgcccgcgtttttcctcgattgcagaataccgactgcaagcatcattaccgcatacacgccgatcacgacccagatcactgtcagcttatccattttccataccccttccgcacattcagcttcaccgctttagcacttatactcgataaagtgattcctatcataccacacagcggccggaaaatcaagtgcaaacggcgcctgcatgaagtttttatgaatattcgcatgaattcttgctttttccctgcttcgcgtgctatactgagatgtatgcgtgcccgggcatataccgggcgccgacggacgtaaaacgcacacctcgaggaaaggacagtgttttaaaaatatgaatatacttacaaagctgttcggcagctacagcaaaaaggagctcaagcgcatcgagccgctcaaggaagccgtgctcgcgctcgacgacaaatacacgaagatgtcggacgacgagctcaagggccagaccgccgcgctcaaggagcgtctctcgctcggctcctcgctcgacgacattctgcccgaggcgttcgccgcctgccgcgaggccatgtggcgcgtgctctcgatcaagccgttcccggtgcagatcatcggcggcatcatcctgcatcagggccgcatcgccgagatgaaaaccggcgagggcaaaaccttcaccgctgcgctgccggcctacctcaacgcgctgaccggcaaaggcgtgcacatcgtcacggtcaacgactacctcgcgaaatatcagggcgagatgatggcccgcgtgttcaattacatggggctgacggtcggcctcgcgatccccggcatgggcgccgaggaaaagaagcaggcgtatgcctgcgacatcacctacgcgacaaacaacgagctgggcttcgactacctgcgcgacaacatggtcacctataaggaacgcaaggtgcagcgcggccacaattacgccatcgtggacgaggtggactccatcctcatcgacgaggcccgcaccccgctgatcatctccggacagggcgaaaaatcgacggagctgtacggcatggccgaccgcttcgccaaaacgctgcgcccggtgcgcgtcgccgagaccgacgagaaggaggacaacgacgcgctctacgaggactacgactacatcgtgaacgaaaagcagaaaacctgcacgctcacaaagcgcggcgtgaaaaaggccgagcagtatttcggcgtcgagaacctcacggaccccgacaacatcacgattcagcaccacatcaatcaggcgatcaaggcacacggcatcatgaagcgcgacatcgactacgtcgtgcgcgagggcgaggtcatcatcgtcgatgaattcaccggccgcctcatgtacggccgccgctacaacgagggcctgcaccaggcgatcgaggcgaaggaaaacgtgaacatcgcccgcgagagcaagacgctcgcgacgatcaccttccagaacttcttccgcctctacaacaagctctccggcatgaccggcaccgcgatgaccgaggaggccgagttcagcgagatctacaagctcgacgtcgtcgagatcccgacgaacaagccgatgatccgcgaggactgcgccgacgtcgtctacaaaaccgaaaaaggcaagttcaacgccgtcatcgaggacatcatcgagcaccacaagaagggccagccagtactggtcggcacgatcacgatcgaaaaatccgaggagctgagcgcgatgctcaagcgccgcggcgtcaagcacgaggtgctcaacgcgaagtaccacgagaaggaggccgagatcgtcgcgcaggcgggccgcaagggcgccgtcacgatcgcgacgaacatggccggccgcggcacggatatcctgctcggcggcaacgccgaattcatggcgcgcgccgaaatgcgccgcatgcaggtgcccgaagagctgatcggcgaggcctcggcctacggctacaccgacaacgaggagattctcgaagcccgcaagacctttgcggagctcaacaaaaagtacaaggcggagatcgcgccggaggccgaggcggtgcgcgggctcggcggcctgtacatcatcggcaccgagcgccacgaatcccgccgcatcgacaaccagctccgcggccgcgccggccgccagggcgaccccggcaagagccgcttctacatctcgctggaggacgacctgatgcgcctcttcggcggcgaccgtttgcagacgatgatggagcgcctgaacgtcgatgaaaacacgccgatcgaggcttcgatcctctcgaacacgatcgaaaacgcgcagaaaaaggtggaaagccgcaactttgcgatccgcaaaaacgtcctgcaatacgacgatgtgatgaaccgccagcgcgaaatcatctacgagcagcgcgaccgcgtgctggacggcgacaatgtgaagccgcagatctggtcgatgatcgagcaggccattgagtcgaacgtcacgcgctttctgcccgccgacacgccgcacgacgactgggatctgcacggcctgcgcgaccactacctcggctggatggtcacgcccgacgagctgcactacgacgccgagggcctcgagaacctcgacccggccgacgtgaccgcgttcctcaaggagcgcgcgcagaagctctacgagctgcgcgaaaaggaattcaccgaaccgatcatgcgcgaggtggagcgcatggtgctgctcaagaacgtcgacacgcagtggatggaccacatcgacgcgatggacgagctgcagaagggcatccgcctgcgcgcctacggccagcacgacccggtcgtcgagtaccgcagcgagggcttcgatatgttcgacgcgatgattgccgcgatccgcgaggataccgcgcgcatgatcctcaccgtgcggctcaagacgaaggaggcgccgaagcgcgaggccgtggccaaggaaaccggcacgaccgcctcggatacacccgcaaaaaagcagccggtgaaaaacggcaagaaacccggccgtaatgatccctgcccctgcggcagcggcaaaaaatacaagaagtgctgcggccgcgatacatgacgcgcgccgccgcgaaaggacgcgacaccctgacgctggataatctcgacaagcgactgaaatactaccacctcgtgctgcggctgccggccgaggcggaaatccccgcatacccgctgcccgagggcttctcgttcacaacctatgcggacggcgaccgcgacacgtggatcgcgatcgagcagtccgccaaggaattcgaccgttatgagcaggggcttgaggcgtgggaacgctactacgcgcgctacaccgaccgcctgcccgggcggatgcagttcatcgaatcaccaaacggcgagaaggtcgcgaccgccacggcatttttcgaccccgaggcgccggacggcgacggctggctgcactgggtctccgtgcggcgcgacatgcagggcaaagggcttgcccgcccgctgatcgcccacacgctgcgccgcttgcgggcgctcggctacggcgagattttcgtctccacgcagacgaccacgtgggtcgccgcacggctctacatggatttcggcttccgcccgaccgaggaaaacctgcaggaaagtcttcttggctggcgcatcctaaagacgctgacaaaccaccccgcactcgcggcgctcgagcccgtctccgaggcggagatgctggttgcgccgcccaattttgagctgtgagcaaatggcatcccaaatatgtgaaaagtccgggcgcggctttttaggagaaaatcatggaaatcgagtacagaaacactaaagaattcacagagcaggaactgcaaaggctgtttttgtctgtaaaatgggaatcggggaattaccccgacaaacttgttcgggcaatgctaaattctacacatgtgatttctgcgtgggatggaaataagctggttgggcttatacgggcgctttccgacggggaaacggttgcctttttgcattatctcctagtagatccggcatatcaggggcatcacatcggcgatgaattgatgaaaagagttttgaggtatttcgaaaatctcctttacgtcaaaattatgccgtccgaccctaagacgctccccttttatgcgcgatacggctttcggcaatacgacaattattcagcaatggttctaaaacacctttcatagtcagccagcttccggctcattgacgaaagctggttagagcaaaaagctccgtcggcataaccggcagagcttttttgctatcaatgctattcaactttctgcgcagcagacggaacgcatctgcttcccccggcttcggccgccggctggacgcaaaatccttttcacttactgcacacgctcgcagatttcgaacgcggcgcgggcgttatggtaggggcacttccacgggccgcagagcaggtgcgagttttcctcgtccggcgaatttctgccgctcgcgagccactcgccggccgggccgttgatgacctgcgccttgatatatgtccagaccttccacgccgtgtcgaggtacttttcgtcgccggtgatctgccacgcattgacgcagccgacgaccgcctcggcctgcgcccaccagaccttgttcggcacggcgatgccgcccgcctcatggccctcgtcgaacaggccgccgtccgcatcgaggccgcgcgaaagcgtgaaatccaccatgcggacggcgacgcgcttcgcctcctccacgagtgcttttgcgcgcgccttgtcggccgcatgcgcctcgagcacctcggccgcctcggtcagcagccatgatccctcgatgtcgtggccgaacgagatctcgcccggcagcgggtgcatcttttcgtcgaagaacatgacgaaatggcggtgctccgcgtcgtagatttcccgcgccgtgacctcgatcagattgacaaggctttcttcgacgcaccggtcgtgccggatgcggaaatagcaggtcatcggctccaaaatgtggatgtgcgtgttcatcgagagattgccggcctcggtgatcgcgccgttgccgctgcccgtgccgcgcgcggtttccagataatacttgccctcacggcattcgcgctcgagatagccgtaggccttatcggcgtatgcccgcgcctcggcgctgccggtcgcgcgcgcgtattccgaaaaggcgtagagcagaaaaccctgtccgtacgtcatcttcgtgtcgtcgcacacagtgccgtctgcgttcagcatccagtagccgccgttttccgcatcccagaaatgcgaccggatatagccgaacgcgcggtctgcgagcgccttataggcggggtcgccgaagatacggtacgcacccgcaaaggtccagagcaggcgggcgttcagcacaaggcttttcggcgcctccttctgcaccgtgaaatctttcgtcaccgcgccgtaaaagccgccgttttcctcgtctaccgtgtatttcttccagaacggaaagatcgagccgcgaagcagatcctcccgcatttcatcgcgaagccgcaagagcttttccatttgttttcctccgtctcaaaaaattcgatacctgcattatagcgcaaaagcgcgcggatttccaccaaaatccgcgcgcttttaaaattattcgctttaaagccggatgccaaggcgctccgccgccctttcacgcaccgcactgaacggcagcaccggcgcggcgtccgccgcatgcgcgccgatgtgcttttccatccacgccatattgtaccaccggccgaatttgtagccgcaatcgtaaaattcgccgacgaaccggtaccccaaatgcgcgtggaacgcgatgctgtcgcgcgtcaaatactcgtccggctcccgcggcaccgcgatgcaggcgttcaggttcaaaacattctgcatccggagaatctcctcaagcgccgcgtacagcctgccgccgacgcccgtgcgcttttggtcgcggcggacgtagatcgaggtttcggcgccccacgcgtacgccgcccgcgtcttgaacgcgcccgcgtacgcgtagccgagaagctctcccccgcgcgccgcgacgagatacgggtgcatgcgcagcgtgctgcggatccgctccgcaaactcgtcctcacccggcacctcgtattcaaaggtgacggccgtatccgtcacatacggcgcataaatcgcgagcagcgcggccgcatcctccggctctgccgcacggagcaaaattgcatcctccactttcagcccgtcctttccgatccgcttctgggcagatcgaggatgcagtcgaacacgctgtcctcgcgcccgttcttcgtgtaaacgcgcgtcacacgcttcgagataccgcagacaatctcgtaatggatcgtatccagcaggcccgcaagctcgtcaacgcggatctcctcgtcaccgtcgcggccgatcagcgtcacgacatcaccgacctgcgccgcaggcaccgcggtcacgtcgatcatgcactggtccatgcagaccttgccgaggatcgggcagcgcacgccgtgcacgaggacgctgccgcggttcgaaagctggcgggagtagccgtccgcatagccgatcgggatcgtcgccacgcgcacgcgcgacggcgccgtgtacgtccggccgtaactgatgtccgagccgggctcgaccgccttgacgtgcgagatcacagaacgaaggcgcagcaccgggcggaaatcgccggggtgcagcacatccgccgagggctcgagaccgtagaggatcacgccggcgcgcaccatatccatgtggctctcggggtaatcgagcgtcgcgccgctgttcgcgcagtggcaaatcgggaacgtgacgcccgctcccgcaagcgattcgacgagctgcgcaaagcaatcgagctgccgcgcggtaaacgcctcgcccgcctcgccgccatccgccaccgcgaagtgcgtgaagatgccctccggcacgaggccgggcaggcggcaggccgcggcgatctccccgaccgccgccgcgtcgcgcgcggcatcctgaaagtaaaagccgaggcggctcatgccggtatccaccttgacgtggattttgaccgaaacgccgcttttcaccgcgctttcggagagcgccgcacagtacgccgtggaatacgcgcactgcgagacgttgttctccgaaagctgccctgcggcctccggcggcgtgtagccgagcacgagcagcggcagagaaacgcccgcgcggcggagctggagcgcctcctcaatgttcgagacggcgagccaatccgcgccgagcgcctcgtattcgcgcgcgaggcgcaccgcgccgtggccgtaggcatccgccttgatgacacagcacagcatcgtcttttcgccgatgcgccggcggatctccgcgaggttgtgcgccgcggcgtcgaggtcgatctccgcccacgttcttttctgcataatatccataagcaaatcgtccttattcataaggcttgcgcggacagaagcgcccgcgcaagccggtattgcaatgattctttacttgaagtagcgcacgccgctctcgaagatctgctggtccttctcgcccggcacgttgaagtacaggttgtcgcccttgcgctcgctgtggcccattttgccgaacacacggccgtccggacttgtgatgccctcgatgccgcagaccgagccgttcgggttccacgtgatgtcgccgctgaccttgccgcacggcgtcgtgtactgcgtcgcgatctggccgttttcgatcagcctcctcagcgcggcgtcgtccgcgacgaagcggccctcgccgtgcgagaccgggatcgcgaacacgtcgccggcattgacaccggagagccacggggacttcgtgttcgtcacgcgcgtgtagaccatgcgggagacgtggcggccgagcgtgttgaacgtcagcgtcgggtcgttgtccttgagatcgacaatctttccgtaggtgacaaggccgagcttgatgagcgcctggaagccgttgcagataccgagcatcaggccgtcgcgcgattcgagcagatccgtaaccgcctgcgcgatcttcggattgcggaacgtcgtcgcgatgaatttgcccgagccctcgggctcgtcgccgccggagaagccgcccgggatcatgatgatctgtgaagagcggatcgccttttccatgcggtcgatcgtgtactcgatgtccttcgccgtgaggttctgcacgacgaggatctcggtctccgcgcccgccttttcaaacgcgcgctttgtgtcgatctcgcagttcgtgcccgggaacaccgggatgaacaccttcggcttcgcggtcttgatgaccggggagccggtgtacttctcgttctgcagcggcacgtcatattctacggcgacggtctccgccttattcgcaaaaattttctcgagcttgccgttccacgtctcgatcaggtcgtccacgccgagcgccttgcagccgatttcaatcttgcccgattcgttgatcatgccgagcacgacgcagttcaggttctccgtcacatcgcggagcgccgcctgctcgacctcgacgacgagcgcgccggccttcggggcgaagagcagcgccgggtcttcggcgtcggtattgaacacaaagcccatcttgttgccgaacgccatcttcgcgacggccgcggccgcgccgccctccttgacgacgtgcgcggaaacgatcgcgccgtcctcgatcagggcgagcacgtcgccgtagaacgccttgagcgcctcccagttcggcaggccggtttcctcgtcctccggaatcggcagcagcaccgcgctgttgcccgcgtacttgaacgcgcccgaaaccgttccgctcgccgttgtcatcgtgacggcgaagctgacgagcgtcggcggcacgtcgaggtcctcaaacgagccggacatgctgtccttgccgccgatcgacggcaggccaaggttgagctgcgcggtcagcgcgccgagcagcgccgcggccggcttgccccagcgttccggcttgtcgtgcaggcgctcgaaatactcctgaaacgtcaggcgcgcctgcatcgggtccgcgccgacggcggcgagcttcgaaaggctctccaccaccgcgtatgccgcgccgtggaacggcgagaagcgcgcgatgcccgggatgtagccgtacgccatcgcggttgcgtcgtcggtttcgcccgaaagcagcgggatcttcgcgaccatcgcgtcctccggcgtgagctggtatttgcccgcgaacggcatcaggaccgtgccggcgccgatcgaagcatcgaagcgctcggaaagccccttctggccgcagacctcgaggcgggcaaggttttcgcagaacgcctcgtcgagcggcttgccggcgaggcaggccggaacggcgtttctgtaatttttcgtctcatccggcgccgcgatgaacgcatccgcgttctgcgtcacgccgttcgtatcgaggaacgcgcggctgagatcgaccacgcggtcgccgcgccactccatcttgagccgcggctccgccgtgacgaccgcgacaacctgcgcgtcgaggttctcctcctgcgcggccgcgcggaacgcgtcgacatccttcgggtcgagcacgacggccatgcgctcctgtgattcggagatcgcgagctcggtgccgtcgaggccctcgtacttcttcgggaccttgttgagatcgatctcaaggcccggcgcgagctcgccgatcgcaacgcagacgccgccggcgccgaaatcgttgcagcgcttgatcagcgtggaaaccgccgggttgcggaacaggcgctgaatcttgcgctcggtgggcgggttgcccttctgcacctccgcgccgcagacctcgatggattcgagcgtgtgcgccttggatgagccggtcgcgccgccgcagccgtcgcggcccgtcgcgccgccgagcagcacgatgatgtcgccgggcttcggctccatgcgcacgacgttcgccttcggggaagcgccgatcaccgcgccgatctccatgcgcttcgcgacgtagccggggtcgtacagctctgtgacctgaccggtcgcaaggccaatctggttgccgtaggacgagtagcccgcggccgcgcccgtcgtgatctttctcgagggcagctttccctcgagcgtatcctgaaacggcaccgtcgggtcgccgctgccggtgacgcgcatcgcctgatagacgtaggctctgccggaaagcgggtcgcggatcgcgccgccgaggcacgtcgccgcgccgccgaacggctcgatctccgtcgggtggttgtgggtttcattcttaaactgcacgagccactgctcggtttttccgtcgatctcgaccggcacctcgatggagcacgcgttgatctcgtcgctctcgtcgaggttatcgaccatgccgtgctttttgaggtatttcgtgccgatcgtcgccatatccatcagcgaaaccggcttgtttctgccggcatacagctcctcgcgcgccgcgaaatactcgccgagcgccttttcgatcgcaccgctcagcctgcccttttcgatctcgatgttgttgaggcgggtcaaaaacgtggtgtggcggcagtggtcgctccagtaggtatcgatcacgcgcagctccgtgaccgtcgggtcgcggtgctcctcgtcgcggaaataatcgcggcagaaggcgaggtcctccagcgtcatcgcgaagcccatggtgccgtaataggccttcagctcctcctcgctccatgcgatcatgccggtcacgcgcttcacgtccgccgggtagtcgatcttcatgtcgaggctctcgggcttttccatcgaggccagccgcgattcgaccgggttgacgatgtagcccttgatgcggtccatctccgcctcggtgaggtcgccctttacggcgatcaccttcgcgtacgccacctgcgggcgctcgccctgcgtcagaagctgcacgcactgcgaagcggaatcggcgcgctggtcgtactgaccgggcagatactccgttgcaaaaaccttgtagtccgccccgacggcgtagtcctcaccgtagacgttgtcgacgttcggctcggagaggatcgtgcgggccgccgcctcaaactccgcgccggaaagcccggagacatcgtagcggttcaaaatgcgcagctcctcgatcgccttgatgccgaggttttgccgcagatccgccatcatatggcgcgcctcgacgtcgaacccctttcttttctccacaaatacgcgtgtgaccatagtaaattccttcctttttgaattttggcgggcttatagggcagcgcccgcggtcctgtggccgtgaatgtcacagggccgcacaccggggccggcattccctccgcaccggccccggcgcagaaaaacagcgcctgtgacaaaataatccgcttttattttatcacaggcgccgtatagaatcaaatatagatttttaaaaaaggccgtcgctttttcgggcaattttgtgctattttttccgcaggttgcggatctcctccgcactgagcgccaccgtgtgcttgatcggcttccactcgatgttcgtgaacaccgcatagaccatcgaaatcgcatacgtaaagacgaacagcgggaacagaagcacgccgacaaccttcatcttcgtggaggcgtggatgttcctgcgctgggtgatgcaggtgacgccgccgacgaaccagagcgtcatcatcgagcccacaagccccgtcacgacggagaggatgcagacgttcatgtccggcgtgcgcgtcacaaagccggcgaccaccatgattgcgttgaagatcagcgtcgcgcaggtcagcacgagacatgggatgttgttcataatcatgtcgaagcaggcgaagctgccgtccacaaccatcttgcggaacatcttgaagccgtagcggctgaacacctgcaagtagcccttgatccaccgcgcgcgctgcatcagcgattggccgagcttcgtcggctgctcgtcgtagatcacggcgctttcgcagtagccgaccggcgtgttatggaggatgcagtccacggtaaattcaaaatcctcggtcagcaggaaatgtttccagccgccgttctggcgggcgatgcggctgctgaagagaaagcctgtgcccgatacgcagctgctcgtgccgagcatcatgcgcggccggttgagctgggtggcctcgcgcaggaaaaagagcgagtagcccgcgctgatccagttatcgccgaaatttttcgagttgcggtagcttgtaacgacctcatagcccgaatcgaacaccttgttcatctcctcgatgaagcgctcgtcgaggatgttgtccgcgtcgaacacgaaaaagccttcaaaggtattttcgccgtactgctcgaaaatctcgtgcaggaggaatttcagcgcgtagcccttgccgacggcgtactggtcctgccgctcgaaaacaacggcgcccgccgcgcgcgccacagccgcggtgcggtccgtgcaattgtccgccacgacgaaaatatccacaagctccgaggggtacgactgcccgcgcacgctctcgataagctgcgcgatgacggcctcctcattgcgcgccgcaatcaaaacggcgtagcggtggttctttttcgccgtgaacaccttctgcctgcggcagagtgaaacggcgagataaaccgcctgatacgcgtagcacgccataaataggatggaaataatgaaattgatgtaggaaagcgttttcatagatagacgtcgtctccttcatgcctgcccgcagcgggcaaggccgtggtcttgtgctccgaattaaaatctcccttttcaaagcacagagcagaattttcgttcacactctgtttacagtttacattatacggcagcccgcacgaagaaacaataggcaaacaccattcttatgacttttgtaagaaaatttaaaaaacaaaaattttaagtgaaatgcgcgtatatgctgggatacgcgaggcggcctataaatccataggccgcctcgctctctgaggattacacctgttttccgaaatctttaccgcggccagcagatcttcccgcatgtggctgagatcttcggccgggtcccgagctgtgaagaaaacataggccatcactgaatttctgcatgccctgttcccacgaaaatccaatagagtgaatgcgttctctatgatattttccggccgcttggcattgcaggacaagccaattcggtgccttactcgttttgcacggtaccgccttgcttgcccgcagggcgtaaatcaaaaaagaatcagcggtaatgaaaaacatcatcgctgattcttttggtgggcgctaacggacttgaaccgctgaccccctgcacgtcaagcaggtgctctagccagctgagctaagcgcccaattttctgttgctcagatattatataacatctcatcggaaattgcaagtctttttttgaaattttttgtttttcctgaaaaaataactgcacggggtattgctatagcggaaaactcctcctctattccgaaagcagattgtatctgccggcaaacccaactcgttccaagaagcgaatgcgataattgcagcccagccatgtgcgcatccaaatggaaacaggagtggcaccgcttacgctgtgtcactcctgctaaattcaaacattcctgcactggggctctttcttaccgtccgtacaatctcgggaagcccctcccagccgggaagccttttttgctgttttatattgcagggacttaaatcagcccttgactgcgccgatcgtgatgcccttgacaaaatacttctggaagaacgggtacacgatgaggaccgggagaacgccgacgacggcgatcgccatgcggatgccggtgctcggcatcgttgccgcgatctcggccgcggaggctgcgtccatgccgcttttcagcgcctgcacgtcgcgcagcatctcgtttagaagcacctgtatactgtacaggctcttggactgctggaggtagtagagaccgtttttccagtcgttccagtaggaaagaccgatcagcagcgtcatcgtcgcgatcatcgggacgctcatcgggatcacgaccgtgccgaggatacggaactcacccgcgccgtcgatgcgcgcggcctcgatgaccgcgtccgggatatttgtgttgaaatacgtgcgcatcatgatgacatagaacgcgttgacgagcagcgacggcacgatcagcgcccaaatggtgctgctcaccttgatgtagcgcgtgtacatcatgtaggtcggcacgaggccgccggagaacagcatcgtgaagaacacgtagaacgcgaggccgttgcggccgggcaggtcgcggcgggaaagcggatacgccatgagcaccgtcatcgcgaggccggcaaccgtgccgatgaccgtcacgagaatcgtgatgccgtacgcgttgaagatcttattgctgctcttgaacatataggcgtacgcgtcaaggctgaacttcgcgggaatgaacgaatagccgctgcggatcagctcgttttcatccgtgaaggaggaagcgatcagcagcacaaacggaaggatacagcacagcgagaggaagaccatcacgatatgcgcgccgacctgaaagctcttattcttttcgaccatagtgatttcccctccttatcagaacaatccgttttcttcgccgccgatcttcttgacgccccagttggcgagaagaacgaggacaaagccgactacgctctggtaaacgccggcggccgaggacatcgggatgtcgttcagcgtgacgagcgcgcggtagacgtatgtgtcaatggtgctcgtaacgtcgatcagcgggccggaatccatcggcacctgatagaacaggccgaagtccgaatagaagatcttgccgatcgccatcagcgtcagcgtgatgatcgtgggcaggaggttcgggatcgtgacgttccaaatctgctgccagcggttcgcgccgtcgatgacggccgcctcataatagccctgatcgatgccgacgagcgtcgcataatagaggatgcagtcgtagccgaacaccttccacaggtggacaatgacgagaatgaacggccagtatttcggctcggtataccacgaaatcggctcggcgccaaaggctttcagaaccgtgttgttgatgaagcccgtctccgagctgagcagcgcgaacaccagatagctgacgacgatgatcgaaatcaggtacggcagcaggataatcgtctggtatacctgcttcatctttttgctcgtgatctcgttcagcaggatcgcgatcgtgatcgcaagcactgtgcccagaacgatgaaggccacgttgtacaaaaccgtgttgcgcgtgatggtgacggcgtccttcgtcttgaaaaggtaggtaaagttgctgaaacccacccagtcgctggccagaatgcccttgcgccagttgacccttttaaaggcgatgatcaggccggtcatcggcaggtacttgtccataaggaggtacagcgcacccggcaggaacatcagataaagcgggatgcagcggtagaagcgcagccactttttcggcttcgtcgtgcgcgcctgcatttccttttccagcgccgcagatttagtcgacatggtttgaaaacccctttcagtcttattctttccttccggaatcagattccaaaagagcatgggcatgcacaggacgccgcgcctctgtacatgcccatgcccttcccctttcggggaaaggacacggattctaaagcgaatcggtttcagcctttatgccttacgcctgctcagcgagccatgcgtcgagctgtgcctgcttctcggtgatgatcgcatcgatgccggcatccttcagctcctgattgaacttcggaagagtctcctccgggttcagagcgccgcagacgagcgccttgtggtacttgttgacgacgttcgtgcaggccgcaatctcgttcggagtcttcgttgcgtcgaaggagaagccgaacgcagcggacttctgcgaaccgttgttgaagtcgcgggtcgcatcccagtagttatccgggaggtcgaggccccagatatcgccgatgaactggttcgggcagagccatgtgccggactttctgtaggtcgtggtcgtcgcgtcgagaccctccgggtagttgatacggtcttcgccgttcgtgatggcgccttcctcaacgacctcgtagtgcgtgccctcgatgccgtacatgtagaggttcgcaacctccgggtcgctgtagagggagttgagcagcttcatcgcggcttccggatgctcgcaggagccggcgatggaccacagcgccatcgtgacgcggtcggtcgttgcgagcgccgggatcatgttgtcgacaacggcgatcttgttctggaggttcgcgttattctcctccgcgtagtagggcttgaggttcgtgaagtagccgaatgccgtgcccgcctcgagcagcgtggaggccgtctccgtggtattgacggcgtcggcctgaatgaggccctcctgcatccagttgtacatcgtcgtcacaagatccttgtactgctcggtctcatagaggttgacaacggtggtgtcctgcgccatatccgagagaacgccgaggttgaccatctcgtcgcccagagcgtcccagccccagttgcggatgttctcgcccgcggaaaccgcgaccggccaaacatcctcggtctcattcttgacggtcttcagaacagcctcgagatcctcgagcgtcttgacggactccatgtcgagaccgagctcctcggcgagatcgacacggtatgcaaagccctgcgaagccgcaaggtcacggccctgcgtgaggccgtagagctcgccgtcgacacggccgcagttgatcatatcccagccgagctcctcgatgatgccctggccgtactcctcgatcagatcatccatcggatagagctggccggaggtcgcgcaggaggcatacggaaccatgtagaccgcgatgaggtcgatgccctcgccggaggagagcatcagggtcgtctgatcggcatagctgccgaacgggaggaacgtgaggttcacgttgatgttgaactgctcctcgaggatcgcgttcatcgcttcctcaacctctgcgacgccgctttcttccttgccggaggccatcgtcacgatatcgagtgtgacgagctcgggctctttcagatcggcctcgcccgaatcggaacccgtgctggattcgccggacgcggcagaatcggagccattgctgctcgcgcccgaatcgccggcgcaggcagcgagcgagagggccagcactgctgcaagaagcgctgccagaattctctttgccattgtctttacttcctttcgtacttttcactattctgcggcggggccgcaggtttgcttttggacaatatatagaatagcagatttgcaggctgatttctgtaaaaatcgtgacttcgaatgtttaaaaaatgacttattcgtgtcgattttgcaagtttctttttcgctccctgcaaaaagcgatcaaaaaagaagcgcccgcgcggacgcttccagttccttgtgcaagatatactactcgcctttcatccattcatggatatttcacaactgccgcgtaaagcgccgcagtccctaaaacggcgcctcacagcttgcgccgccgcttcgccgtgcggtattcgagcggcgaaaggcccgtatactttttaaatacctgcgaaaagtacgaaaaattcgagtagccgacctttgtcgcgatgatgctcaccgggatgttcgtgtcgccgagcagcgactgcgccgtgcgcatcttctccgtgatgatgtagtcgtttagggaggagcccgtctcgcgcttgaaaagccgcgagaggtactcggggttcaggtagatcgcctcggcaatgtcggcgcggctcaaatccttgtcgatgttgcggcggatgtagtccatcgcgcgctgcaccggcgtctgctcggcccggttcggcgcctcgccgtccttttccccgcggtactgcacgtaagcgctgtagcgccgctcgttttccgcctcgcgcaccttgcaggcggcgcgctctacggcggcctcgatctcggcatacggcgcgggctgcaagatataatcgaagctgccgagcttcacggcctcctgcgcatactcgaattccgcgtgcgcggtgagaaagatgcacaccacgcccgaaaaccgctcctgcacccagcgcagcagcgcgaagccgttcgtcggcggcatctcgatgtcgcacagcagaatatcaatgcgatcgcgctcaaagaccccctgcgcctccttgacgctgtacgccgtgaaaacattttcggcgcccaggcgcgtccagttcacaccggcggccatgctttcgacaacctccggctggtcgtccacgatcagaacgttcatgtgccctcctccttttcttcgttctcgggcagcgttttggggtcgatcgggataaagatctccgaaacactgccgacgtcgcggttaaaaaacgcgtaaagcacaccttcgccgtagatcagctccatgcgctttttgatgttgttgatgcccacgtggcgctgggcgtagaccgggctgtccgggtcgttgatctcttggatcacgctttcgggaaagccgctgccgttatcggaaacggtcaggtccgcaaaggtatccccgccgctgcacagcaccgccgcgcgcacgtcgatctcgagcgggtggtccggcgaataatcgtgcttgacggagttttccacgaaggtttgcagcgaaagcggcggaatcatcatgctgagcagccgcgcgtcggcgtcgatgcggcagaccggcgcatactgcgaggaaccgccctgcatttcaatataattgcggatgtggtcgagctcccgcgaaagcggcacaagctccatgctgtcctgaaaaatatagcggatatgcctcgaaacggcgaggatcatcttctggatgcggtcgtattttccggcctccgccagcgcgtacaggcttttcaggcagttcaaaaagaaatgcgggcggatctgaagctgtaaatagcgcagctccgccttctgcttgtcgagctcgttctcgtaggattcgatcttcaggttcttgatctgcgccatcatcgtgttgaacgtctcgttcatctggctgaattcccggatgttcgtgcggctcacagcctttgcatcgagcttgcccgcgcggatctgctccatcgtgccgcggatctcgtcgaccgggcgcagaatcgagcgcgtcatccgccactggatcagcgggatcaggacgagcgccagcacagaaatgacaaagagcacgctttgcagcatgtcgagcgcgccgaaataacccgtttcgccgacggccagcaccacgcggcaatccgtgcccgcaatgtcgcgccccacgatcatgtagcgccggctgctgccggagaagaaatagccgctgtagtcgccgttcaggtcgatgccgctctgctccacaaagtcgaccgccgtcagcgggttgttgtcgaggtcggagaacagcgcgacggcctcgcggtcgagccgcagccggctcgtatccccgagccgcccgagcggcgtcagcgcgacgaggtacgtgccgcgcccgccgtaaaaccgcagcaggtaggcttcgccgccgatctcgatatgccgccagcccatgccgtaggaaaagagatccgccccaaccgccccgcgcacaaagctgcggatctcggtcttttcctcataggagaagtcccctgtgaacatatcacgctcggtgctgctcggcacgctgtaaatgaagagggcgccgaggtcctcatacgccggcatcgccgttttgagctgggtaaacagattgtacgacgcgagatacgcgtcaagctgcgaggcgccgccggagagcgtgcggaaatcgacgctcgtcaccatgacgcccgtgaggaaatcgtcgaccgattcgagcgcgtcctcaatgcggccggcgtggtaatccatcgagcgcatattcgaatcggcgagcttgccgttaaagacgtggatggagtaaaaattgctgacaaaaagcagcacgatcagcggcacggtcacgcagagcaccgcggtcatcagcttgcgccggaatgaaattttcttttccatctgcacccgcccccttgcacggccgggacgcgctgcgcccgcggcatctctccggtccgccgcctcaaagcgcggccttgtatcctgcggggcaggatacacagacagagcgcgctctgcgggcggccccagattgtttgataagttatatcataccagatcccgccgtgctgtgcaaggaaatccgagcggaatcgttgaaaaacgcgtcgcttcatggtatactgagggtaactttgaactttgggagactctgctatgaccgaaaacaaggcgaacgccatcagcgtcagcttgctgaaccgaaaaatctacgcggtctgctacacgggcttcgatacaatcagcgcgtttcacggcgcgctgtacggcgcgcggcggcgctttctcgaaaccggaaaggccgctcgcgtgcgcgaaaccggcatctacgacggcacgcccggcgaagtgcgcggcaaaatcggccgccgcggcttcaagtgggaaaaatccgcgggcaagcgcacgctggaatccgccttttcaaacggcagccagcgcggcatcgcgttttgggacccggacggcgccttacgcgcccgcatcttcttcgaccgcgagcagcactggctgcgcaccgaatatttcgcgccggacgacgaccagcgcgcgaaggtcagcttcaagcccgacgacacgcgcgacgccgtgctgcgcttcgactacagccgctccaccggcaagacgaaggagacgacgctcttccccgtgccctatgcctttcagacagccgagcagagcctgcagaacgcccactgcggcagcgacagccttctgctgatcgcaaccgacaccggcgaatttgcctactgcccgcgcgaggagcagcagcggcgcatccgctttatgaaggacagccgcaacgcctccgtcatgctctcgatgggctgggaggtcaaggacggcgatatcacgccgcccggcgcaccggacgtgcgcgaccccgaatacatcttcacgagcatcgaggaaaccgtgcgcacggaacgcccggcccccgaggacctgctcgccgagcttctcgaggaggctcgccccgaggccgcggcgccgcacgatgcggccttagcagagccggcggaagatgtaccgggcatcgatgcgtcgcaggatcgtgacgctgcgccgggtacggagccggaatccccgccccctgaaaaggacgaagccgcaaaagcgcctgcccccagtgtatcggcaaaagccgaggaaatgcccgaaaaagaagccgagcctgcggaaagccctgccggagaatctccgaacagcgacccgcaaagcgacgccgccgaggcgctcgcggcgctcggcatctccgccgcagacgccgaacgcgtgcgcgaaacgctcggccgcctgctcgaggaggacggtgcgccggctgaaacgaccgacgccgcttcgctcactttgatccgcgcgggcgaggccgtccgctacaccggccggctcgaaaagggccggcgcgcgggcttcgggcgcaccgaaacgcccgagggcgtcacgctctacgagggcgagtacaaggcagataagcgcgacggcttcggcgcgcaccactaccgctccggcgccgtctcctacatcggcgatttcaaggacgataagcgcgcgggcttcggcgtttcgttccgcgaaagcgaccacgcgctgcacgtctcccgctgggcggacggcaagccggagggctacgccgcgcttttcgatccgagcggcgcgctgcgctacgccggaaaaatcgagggcggcaaaaagcagggggcgggcgtttcgatcgaccccttggccgacaccgtattcgtcgcgaaatacaaggacaacgcgccgaccggcgagggcgcgctcttttccggcgacggcacgctgctctacgcgggcggctggaaggacggcaagcgctgcggccacggcgtggagttcgaccgcgcgggcaacgtggtctacgccggcgaatggaaggacgacgcctatttgaacggcatcctctacaaaaaggtgcagggggcggccgatggagagaattgagctgcacgacgtggaatacggcgactgcacggtgctcgtcgggcgcagcaattcgattttgatggtcgactgcggctccgtcagccgctacacgcggcagggtgaaaccgagatcgaccggcgctttgcggagatcttcgaccggtacagcggcgcgcggcagcggcagtttctgctgacgcactgccaccgcgaccatatgaacggctttttgaaaaagctgcggcaggacccgatttatttcgaccgcgtctacatcccggcgctgcccgccgcggcgcgcagtgcgtgcccgatcctcgaattcgccgtgttttcgcactttttctccgtgccgcagagcgatttcgcgcaggtgaacacaacctgcctgcggctcttttcgctgctcgacggcacggtcggcgcagagcgcatcttcacgctgcgcgccggcgatgtgttcgccctcgacggcgatttctacgcggtgctctcccccgagcccgcggccttccccttcgacccgatgctcgccgaggcggcggaagcgctgaacgtctgcctcgcctccccgttccacacgggctgcgaagccgagtttctgcgcgtcaaggatgaattcctgcgcatcttcgagcgctgccagcgggcgttcgccccgtccgaccgggaaacgcccggccgcaggcgcgtcctgctcgacgcgctcgccgacctctgggaccgcctcgaagcgatgcgcgcggagatcacccgctcccccgccgcgccggacatccgcgagatcctcgaccggcccgtgctgcgcacgctctacaccgaaacgctcaacgacctctcgctcgttttccacaacgtgcgcgcgggcggcgccagcagcgcggatattctgatgaccggcgacgtttcgggcgcggtgctttcccgcctcgcgccgaagctctacgacggctactacgccgtgaaggcgccgcaccacggcaccgaaagccactattccccggtgctcggcgacatcgccgccgcacacctgctgatctccaacggcgactaccacgcgggcggggagatctcgcagcgctacgtcgatatggaggcggtcaagcactgcacaagccccggcgcgtgcgcgtggttccgcacggcgggaagctgctgcaaccgcctgctgcgctgctacgagcagagcgacgccggccgcctgacgcttcgctgccccgccgccggcaaggaccgccgcacgccctgcggcatctatgtattcagccacagcggcgccaaaggctgccactgcgactgatctcctttttcgcacggctttgggctgtttcagccctaagctcacttcagcatgtgttccacgccgtcgattagctggccgacggtgtgcacggccttcgccgtgctgcggcgcatctctttcgagcgcgactttgcggatttcttgccgttcatcatcttcgaggatacggcggcaacggccgcgcccgcggcgatgcccagcccgatgcccttggcgatattcatgctctgcttatacacggtatcaaacctccagatccatattgcggctttcagcaaaaataaaagagccgtcatcgtttagtttccccctttttacgaaaacatacatcccgaaaggacctgcttcccatggttttaaacatcgttatggtcgagccggagatcccgcagaacaccggcaatgtggcgcgcacctgcgcggcaaccggcgcgcggctccaccttgtcgggccgatgggctttaagctcgacgaccgcaaattaaagcgcgccggcctcgattactggcacctgctcgacatcacgtactacgattcgctcgaggaatttttctccaaaaatcagggcgaattctttttcttttcgacgaaagccccccgccggcacaccgacatccgctacccggacggctgctacctgttcttcggcaaggagacggccggcctgcccgaagcgctcctgtttcaaaacaaggaccgctgcgtgcgcatcccgatgctttcggaggcccgcagcctgaacctttcgaacagcgtcgccgtcggcgtatacgaggcgctgcgccagtgggactacccggcgctctccggcgcgggccgcctgcgcggctacgactggagcgacgccggcctgtaaagcccggcctttcagaacgctttccaaaaaagtgtggcaaaaaaatgtcaatttatgcggaacaccttgaaaaatccagcgttttggtataaaataaaatctgtgaccgggctgtcccgggaacggcccgtttcagggcggaaatgcaaaacaatttctcaatatattccaagaaggagtgctcgcaaatgaactacctcaacaagaagaccgtcgaagacatcgacgtctccggtaagcgcgttctggtccgctgcgacttcaacgtcccgatgaaggacggcgaaatcacggacacgaagcgcattgtcggcgcgctgccgaccgtcaagtacctcgccgaccacggcgcaaaggtcatcctctgctcgcatatgggccgcccgcacaacatcttcaacgacgttgtgaagctggacaagaaggaaaagaaaaagatcgacgcgatgcccgctgaggagcaggctgcggcgaccgagaaggcgcttgaggccgcaaagggcgacgtgacgaagttctcgctcgcaccggttgccgccgagctctcgaagctcctcggcaaagaggtcatcatggcgaaggacgtcatcggccccgacgctaaggcgaaggccgctgcgctcaacgacggcgacgtcatgattctcgagaacatccgcttccacgcggaggagacgaagaacgaccccgctttcgcgaaggagctcgcttcgatggccgacatctatgtcaacgacgcgttcggcaccgcgcacagagcgcacgcctccacggccggcgcggcggattacctgccggcggtctgcggctacctgatccagaaggagatctccgtcatgggcggcgcgctcgagaacccgaagcgcccgttcgtcgcgattctcggcggcgcgaaggtttccgacaagatcggcgtcatcaacaacctgatcgagaaggtcgatacgctcatcatcggcggcggcatggcttacacgttcttcaaggcgctcggccactccatcggcacctccctgtgcgaggacgacaaggttgagctcgcgaaggaaatgatggagaaggcggagaagaagggcatcaagttcctgattccgatcgacaacgtcgtcgcgaccgagtacagcgcggacgccgagtggaaggtcgtcgattccgacgagatcccggacggctggatgggccttgacatcggcccgaagacgcgcgctctcttcgcagaggctgtcgccaatgcgggcacggtcgtctggaacggcccgatgggcgtttccgagtgggagaactttgcgaacggtacgatcgccgttgcgaaggccgttgcggacagcgacgcgatctccatcatcggcggcggcgattccgctgcggctgttgagaagctcggcttcgcggacaagatgacccacatctccacgggcggcggcgcttccctggagttcctcgagggcctcgagctgcccggcatcgcctgcctcaacgagaaataattcactttgaagcgggagctgggggtttcctccgctcccgcattctttgaaatcaaccgcaaacacaaaccgctgaattatggaaaggacggattatccaatgaacaaggctgtcagaaaggctgttatcgccggcaactggaagatgaacaagacccccgcggaggccaccgagctgctcaccgccatcgcccccctcgtcaaggacgcgggctgcgacgtcgtcgcgtgcgtcccgtatgtggacatcgccgcggcgctcgaggccacaaagggcacgaacgtgaagatcggcgcggaaaactgccactgggcaaagagcggtgccttcacgggcgagatctccgctgaaatgctcaaggcctgcggcgtcgagtacgtcatcaccggccacagcgagagaagaacgtatttcggcgacaccgacgtcaccgtgcagcagagaacgagagccgcgctcgacgccggcctcaccgtcatcgtctgcgtcggcgagtacctcgagcagcgcgagcagggcatcacggacgagctcgtcgcgatgcagacgaagatcgcgctcggcggcgtgaccgaggaagagctcaagcgcatcattatcgcctacgagccggtctgggccatcggcaccggcaagacggcgacggcagagcaggcgaacgaggtctgcgccgtgatccgcgcgacgatcaagtccctgtacggcgaagcggcggccgagggcatcacgattcagtacggcggctccatgaacgccggcaacgcggccgagctgcttgcacagccggacgtggacggcggcctcatcggcggcgcctccctgaagccggccgactttgccgcgatcgttgaagccgcgaccaagggctgattctgagacccggaaaggacaaataccgcattatgaaaaaaccagttgtactcatgattatggacggcttcggcttctccacgccggagggcaacgcgattgccgccgcaaataagccgaacctcgacaagctgttcgctgaaaacccgctgacgcagatcggtgcctccggcatggacgtcggcctgccggacggccagatgggcaacagcgaggtcggccacacgaacatcggcgccggccgcatcgtgtatcaggagctgacccgcatcacgaaggccgtgcaggacggcacgttcttcgaaaatgaagcgctcgtgcacgcaatgaacagcgcgaaagaaaacggcaccgcgctgcacctgatcggcctgctctccgacggcggcgtgcacagccacaatacccacctctacggcctgctggaaatggcgaagaagatgggccttgagaaggtgtacgtccacgcgctgctcgacggccgtgacgtgccgccctcctcgggcaaggatttcgtcgggcagctcctcggcaagatggaggagatcggcgtcggcaaggtcgcgaccgtgatgggccgctactacgcgatggaccgcgacaaccgctgggagcgcgttgtgaaggcctatgacgcgatggtctgccgcgagggcgaggaattcgactgcccggtctgcgcggtttcaaagtcctacgagaacggcgtgaccgacgagttcgtcgtcccctgcacgatcaagggcggcgaggcgatctcggcgaacgactccatcgtgttcttcaatttccgccccgaccgcgcgcgcgaaatcacccgcacgtttgtggacccggatttcaccggttttgagcgcaggaacggcttcttcccggtcaactacgtctgcatgacgcagtacgatgcgacgatgccgaacgttgaggtggctttcaagccgcagagcctcaaaaacacgctcggcgagtacgtctccgacaagggcctccagcagctgcgtatcgctgaaaccgagaagtacgcgcatgtcacgttcttcttcaacggcggcgtcgagaagcagtacccgggcgaggaccgcatcctcgtcaattccccgaaggtcgcgacgtacgacctccagccggagatgagcgcctatgaggtcacggacaagatggtcgaggccgtcaagtccggcaagtacgacatgatcatcctgaatttcgcgaactgcgatatggtcggccacaccggcgtgtttgacgcggcgaaggcggccgtcgaggctgtcgacacctgcgtcggccgcgtcgcggcggcagttgacgagatgggcggcgtgctgctcatcaccgccgaccacggcaacgcggataagatggtggacacggacggcgagccgttcaccgcgcacaccacgaacccggttccgttctgcgtcgtcggctatccgtgcacgctccgcgagggcggcgtgctggcggatatcgcgcccacgatgctgaaggtcatggatctcccgcagccggaggaaatgaccggcaagagcattatcctctgattctatttgaataaaaggtgcagaccgttccgcggcctgcacctttttcatatgatccggcacattttactcagactgcacaatctttgccgaatcttagccaaaatttcatttacttttccgcttgaatctgttagtatatagataaggatacccgagaatttttgcgcagccccttagaagccatcgttccccgtccgcagcagtcccgtttcgcgataatttaaaggaggtcaaatctatgaatgccaccaaaagaatcggatgtactctgctcgccctcgctttcctgctgctcgcgggctgcgccgcaccgccgcaggcgaaagccgacgacgctgcgtctgacttcgttttcggagaggacggctacgcgtatgcgccggcgccgttcggcagcacgcgcgaggagctggaagcagccctcggcagcgagatgatcgacaaaggcagcaacccgcatacggatccgtttgaatatctgagctatgtgacgcccaatcaggacgtgcagctttccggcccgaacctgacaagccgcgtagacgcgcagttcaccgaggacgacgggcttttcgcgatcacctttaattccgccgtcaccccggatcagcgcgaggatttcgtcgaggcgtgccgcagcggattcaccgcacttttcggcgagccggccgaggacacggccagagaaaacggctggcacatcctctcgtgggaggacgaggaaagcggcaccgctttcatggtgaacatcgacggccccaccaagtttgacgagcaggaggccgaggtatacaacgtcatgctcggcgcttatgaaaaatggcgctacaccgaggccggcgagtgagccggcggatgaccgcgccaaaatccggccttgcgccgcagaacagaaaaagctcgggacacgctgcaaggcgtgccccgagcgcttgattttaccggataaaatcggtaaaaacatgcggctccttttcggggaggccgtacttttcccgcccgagcgcgatgctcttcatcaggaacgccatgtttttcccgagcgtccgcatgatctgcatgccctcgagatcttttttgacgtcctccgccgtgcggccgtgcacgctgttccaatactgactggacgcgaccggcataccggaaattgtgaaaaacttgttgatctcgtcgaaggtggcgctcgcgccgccgcgccggcagctcacgactgccgcgccgaccttcatcgtcttgtcgaaagccgtgctgtaaaacagccgcgtgatgaaggacatcacggtggaattagccgaggcaaagtacaccggagagccgatcacaatgccgtctgcggcctcgagcttcggggcggtctcgttgacgaggtcgtcaaacacgcacttccccgtctgtttacatttgcggcagccgatgcagccgcgcagatcccggtgccccacgtggaggatttccgtctccacgccctccttttgaagcgacgccgccgcctcggaaagggcggtataggtgcagcccctcgcattcgggcttccgttaatcaataaaaccttcataaaaaacttcctttcccctgcttttcagccctcagcggacgaggctcgcaaggcgctccacggtctcgggcgattgatggtcgaagaacatgctctgccgggtatcgagcgcggcgatgcgctccatatccgcttcggagagctgaaaatcaaagatgtcgatattctcctgcatgcgcgccttgtgcaccgtttttgcgagcggtacaataccgcgctgcacgagccagcgcagaacgacctgccccacggttttgccatactgtgcgccgattccgcgtaaaacaggattctcaaaaatcccgttctttccctcggcaaacggcgcccacgcctccaccgtaatgccgtatttgtcgtgcacctgcttggccgcgccctgctggtggaacggattgacctcaatctgattgaccgcgggcttcaccgcatggaacagcgcgaaatcgacgatgcggtcgggatagaagttgctgacgccgatggcgcgcagccgcccggcatggtaaaactcctccattgcgcggtaggttccgtacacatcgccgagcggctgatggatcagcaccagatcgagatactcgacctgcagcttctgcatggaggcctcaatcgaggccttcgccttttcatagccggcgttcgaaatccaaacctttgtggtaatgaacagctcctcccgcggcacgggcgaacggcggatcgcctcgccgaccgccccttcgttcccgtaagactgcgccgtatcgatcagccggtagcctgcgtcgatcgcgtcgagcacggcacgcgtacacgtgtccgcatcctgaagctgaaagacgccgaagcctgcggcgggcatctcgacgccattgttgagccgaatggtttccatactctgttcctcctaaaaatatgcttgcgctccaaatggttttctgctacaatttcattgtacaaccctgtagtaactacagagcaagcataaatttcaaaaaacagaggatttttttcggagggatccgcatgtacacgatgaaggacgtctgcacaatgaccggcctgccctatgagacgctgcgcttttactgcaacgaggggctgctcccgaatgtacggcgcgacaaaaacaactaccgcattttttcagagcgcgacctgaattggctgcagggcctgctctgcctgaagcgctgcggcatgagcctcaaggacatgaagcgctatatggcgttctgcttaaaggggcaggaaagcatcccggcgcgcaaggacatgctgcgcgtgcagaaggaaatcctgctgcggcagatgcaggagattcaggaatgcatcgattttatcgacgataagcaggcgttttacgacggcgtcttgaacggcacgatccgctacacgagcaacctgatcgacctcgaccaaaatgaaaccgcatgaaaaagggacgggcgcgctgcacggcgcatccgtccctttgctcttcgccctatttttccccctgccgcctgttctccagcgctttcagcgggcggttgacatagcggtcgcgctcgcgcgcgttccacgcttccagcgtgccgcgcaggcgcttttccgcctcgtccacctcgatgcgcagctccgccgccgtcatgcgccgcgcgccgtggccgagcacgatcatctgctccgccatgtcggaggtcgccacgcgcacgcggtgctttcggccgatctcatacgtcgcgcgctcgatgtacgtgtccgccgtctcggcctgcttcgtgaacacgaccgtgatgttgtggtagcggaacacgtccgccgtgtcgcgcggcacgcggtacgcgtcaaaaaccaaaatacagatgctgcggctgacgctctggtaattgcagagccggtccatcaaaatctgtcgggccgtgtcgatgtcgcgcacggcggtcttttccagatcgtcccacgcgaacaggatgttgtagccgtcgatcaggaggtactccgggtcggtatcgcggtcgggcaccggccagagcgcacggccctccgcttcctcggcgcgtacggcgctctgcgggcgcaggtcgcgccgcttcaccgggccgtaggtgcgctcgaaaatcgccatcagctccttgtcggaggcaaaggggcgcatctcgcgcaccgcgggcgcggcaggcaccgcttcggccgcttcgccgaggcgcaggccgctttccacgtgcatgtgcgcggcggcgtcccgccagttgaccacaaagcccgcgccgtgcgcacagaatacggaatcgccggtgttttccgtgtcgtgctccgcgtcgtagccgatcgactcgacgaccgccgccgtgttgtggcagggccgataccccgccggcatgcaggagaggctgccaaggccgcgcgtgtaggccgcgacctccagcgcatacccgcgcagctcggaaaccggcgcgctgcccgtgatcacggcatttccacccacggtctccggcggcgcgctttcggcgcacagccgctgcaaatcggcgagcgcgcggccgacgtgctgctgcggaatctcgagacggaattcgtaccacggctcgagcaaaacgcttttggcgcttaaaaggccgtggcgcaccgcgcggtaggtggcctgccggaagtcgccgccctcggtgtgcttcaaatgcgcgcgcccggcgacgagcgaaattttcatatcggtgaccggcgatccggtcagcacgccgggaaagctgcgctcctccagatgcgtcaaaatcagccgctgccaattgcggtcgagcacatcctcactgaggcgcgaggcaaagcgcagcccgctgccgcgcggacccggctcgagcagcaggtgtacctcggcgtaatgccgcagcggctcgaaatgccccatgccctcgaccggcgcctcgatcgtctcgcggtagacgatgctgcccggcccaaacgtgaccgccatgccgaagcggtcgagcagaagccgctgcagcacctcgagctgcacctcgcccatgagctgcacatgcagctcgcgcagctgctcgttccacacgacatggagctgcgggtcctcctcctccaaaagccgcaggcgctgcaccgccgtgtgcggctcgcagtctgcgggcagaatcacctgatatgtgagaaagctctcgagcaccggcgcaggcgtatccggctccgcgccgaggccctcgcccggatacgttttcgtcagccccgtcacggcgcagacgccgccggccggtactgcttccgcaagctggaatttcccacccgagtagatgcggagctggtcggccttctccgaccacgccttctcccccgtgccgcccgaaagcaccgccttgacgggcagtgtgccgcccgtcaccttgaggtaggtcagccgcgcgccctgcgcgtcgtgcccgatcttgtagaccttcgcgccgaatgccgccggatactgcggcgcgcgcgcgtatttttcgagcccgcgcagaaacggctccacaccctcgagcttcagggcggagccgaaccagcaggggaagagctttcgcgccgcaatcagcggccgaatggcctccgcctccacgcgccccgtctccagatatgcggcgagcgtttcctcgctgcacatggcaacgttttccagaaaatcgccgctctctgtggaaaagtccacgcagccgtcggaaaggccgctttgcagcgatgcgagcagcgcctgccggtccgcgccgctgagatccatcttgttgacgaaaatgaacgtgggcaccgcatagcgctcgagcagccgccagagcgtgcgcgtgtggctctgcacgccgtccgtgccgctgacgacgagcacggcgtaatcgagcacctgcaaagtgcgctccatctcgctcgaaaaatccacgtggccgggcgtgtccagcagcgtgagctccgcctgcccgagcggcagcacagcctgcttcgagaaaatcgtgatcccgcgctcgcgctcctgcacgtcggtgtcgagaaaggcgctctggtggtcgacgcgcccgagcttccggagctgtccgcccgcgtagagcatcgcctccgaaagcgtcgtttttccggcgtcgacgtgcgccagtatgcccagaatcagctttttcatcgattttcccagtcctttcgcttggctttccgcctttgcagccgcacgcatcctttcgcgcgcgccgccgcttccgccttgttcctgcggctattataccattttccgcgccgcctgacaacatcgcgcgcctttcccgcgttttttctcggcaaagcccttgcaagtttcgcccgcatttgctataataaattcagtttttttaccgggccgcaggacgcccgtttttttgtttgttttgcggccaaaaacagggatgcgaaaggggcagtatgtttatgaggaaaatcggttttgacagtcagaagtacatccgcttgcagtcggagcacatccgcgagcgcatcagccagttcggcggcaagctgtatctcgaattcggcggcaagctcttcgacgattaccacgcttcccgcgtgctgcccggcttcgagccggacaacaagatcaaaatgctcttagagctcaaggatcaggccgagatcgtgatcgcgatcaacgcgaacgacatcgagaagaacaagcgccgcggcgacctcggcatcacctacgataccgacgtgatccgcctgatcgacgttttccgcggtttcggcctgtacgtcggcagcatcgcgctgacgcagtacgccgaccagccctccgccgaaatcttcgaaaagcgcatgacggcgctcggcttaaaggtgtaccgcctgtaccgcatcccgaattacccggccgacatcaagctgatcgtcagcgacgagggctacggccgcagcgattatatcgagacgacgcggtcgctcatcgtcgtcaccgcgcccggccccggcagcggcaaaatggcgacctgcctctcgcagctctaccacgagcacaagcgcggcatcaaggccggctacgcgaagtttgagacgttcccgatctggaacctgccgctcaagcaccccgtgaacctcgcctacgaggccgcgaccgccgacctcaacgacgtgaacatgatcgaccccttccacctcgaggcgtacggcgagacgaccgtcaactacaaccgcgacatcgagattttcccggtgctgcgcgcgattttcgagcgcatctacggcgagtgcccgtataagagcccgacggatatgggcgtcaacatggcggggctttcgatcgtcgacgacgcggtgtgccgcgaggcctcaaagcaggagatcatccgccgctatttcaagacggcgtgcctcgtgcggcagggcctttccgctgaggaggagctgaacaagatcgagcttctgatgcgtacgctcgacgtagagcccgaaaaccgcggcgtcgtgccggcggcgctcgccgttgccgagcggaccggcgagccggcggcggccatcgagctgccggacggccagatcgtcaccgggcgcacgaccgcgctcttcggcgcctcctccgctgcgatgctgaacgcgctcaaaacgctcgccggtatcgacgacgcgatcaagctgatctccccgaccgtgatcgggccgatccagacgctcaagaccgactacatgcagagccgcaacccgcgcctgcacacggacgagatgctcgtcgcgctcgcgatcagcgctgcgaccgatgaaaatgcgatgcgcgccatgcagcagctcgacgccctgaaccgctgcgacgcgcattccacggtcatcctctcgaatgtggacgacagcgtgttcaagcgcctcggcgtgaacatcacctgcgagccgacctacgagaacaacaatctctaccacaaataagccataaaaacaggcgggcgccggtatctatccggcgttcgcctgcttttttcttaaatattgtacttagaaatgtaggccggctatgccgcggaaaacgcggctgcatcggtttcccgccccctcctcacagcgagccgccgaactccaagagctgcggcacggagctttccagcgcggcggccgttttgatctcgagcacaacgcgcacaccggccgcacgggcgcggtccagccgttcgtgcaggtaatatgcagctcggaaaagaacgccccgaagctgttcatagcctcggggcgtttggtattattttagaatctgtcgcgcttcacatacgaggtgtggaggatctcgtgcgccttatggcagcccgccgggccgcccatccactcgtagcactcgtggacgaccgggttcaggtggctcttgcggagcgtcttagcctcgtcctcatcatagagcgcctttgcacggagcgccttgatgtccgtaaagctgcggaccgacgccggctggatcggctggccgccgccgttgacgcagccgcccgggcagcacatgacttccacaatgtggtaatccgcctcgcccttctcaatctttgcgagcagctcgttcgcattgttgagaccgctgacgaccgcaaccttcacatccatgcccgcgaccttgtacacggcctccttgaagccctgcgtgccgcggatctccttgtattcgacattcgcgtggtcggtgccctcgagcacatccgccgcggtgcgcagcgcagcctcaagcacgccgccggtcgcgccgaagatcgtcgcagcgccggtggaaacacccatcgccgggtcgaaatcctcctcgggcaggcgctggaaattgagctgcgccatcttgatcatacgggcgagctcgcgcgtggaaatcgaaatatcaacgtccggcaggccggccgcattctcgtcgttgcgcaggatctcaaacttcttcgcgacgcacggcatgacggaaacggaaacgatcttttcggggtcgatgccctccttctcggcgtaccacgtcttgatgagcgcgccggtcatctgctggggagacttgcaggaggaaagattctcggtgagattcggataatagtgctcgcagaacttgacccatccgggcgagcaggaggtgatgatcggcagcttgccgccgttcttcacgcgatcgatgaactcggtcgcttcctccatgatcgtcatatcggcgccgaaatcggtgtcgaacaccttgtcgaagccgaggcggcgcagcgcggcaaccatcttgccctcgacatttgttccgatcggcatgccaaactcctcgccgagcgcagcgcggacagccggcgccgtctgcacaatcacgatcttatccggatcgttgatcgcgtcgatcacgtcctgcgtgttgtccttttcggtgagcgcgcccgtcggacaggcgttgatgcactggccgcaggagacgcaggccacgtggctgagcggctgctcaaacgcgcagccgatctcggtgtcgaagccgcggttgtttgcgccgatcaccgcgacgtgctgctgctggcaggccgcgacacagcggcggcacaggatgcacttcgcgttgtcgcgctcgaggtgcagcgtggaataatccttcttgcccgcaggcacggcgccctcaaagcggttttcatcgtctatgcccatgtcattgcagagcttctgcagttcgcaggtgccgcttctcttgcaggagaggcacttgcggtcgtgcacggagagcagcagctccagcgtcatttttctggatttctgcaccttcggcgtgttggtgaaaacctccatgccttcgtttacgggatatacgcacgcggcgacgagcgaacgcgcgcccttaacctcgaccatgcacatgcggcatgcgccgatctggttgatgtccttcaagaagcaaagggtgggaatgtcgattccggcttctctagcagcttcaaggatcgtgctgccggcaggcacttcgcaggccatgccgttgatcttgatgtttaccatatccattgtatacacactccttccttatttcttctcgatcgcgtcgaacttgcacttctcacggcagacaccgcacttgatgcacttctgcgtatcgatgacgtgcggctggcgaaccgcgccggagatcgcgccgaccgggcagttgcgcgcgcagagcgtgcagcccttgcacttgtcggcgtcgatgacataattcgtgagtgccttacatgcgccggccgggcagcggtgctcggtgacgtgtgcaatgtactcgtcgcggtaatatttgagtgtggagagaaccgggttcggtgcggtctggccgaggccgcacagcgagttctccttgatgtagtagcagagctcctcgagcttgtcgatgtcctcgagcgtgccgttgccgctcgtgatcttgttgagaatctcgagcaggcgcttcgtgccgacgcggcacggcgtgcacttgccgcaggattcatcgaccgtgaattcgaggaagaatttcgcgatatcgaccatgcaggtcgtctcgtccatgacgatcaggccgccggaacccatcatggagccgatggcgatcagcgaatcatagtcgatcggcgtatcgatgagcgacgccgggatgcagccgccggaggggccgccggtctgcgcggccttgaactggtggccgcccgggatgccgccgccgatttcttcgacgacctcgcgcagcgtggtgcccatcggaacctcgacgaggccggtgttgttgatcttgccgccgagcgcgaaaacctttgtgccggggctcttctcggtgccgatgctgcggaaccagtcggcgcccttgaggaaaatctgcgggatgttcgcatacgtctccacgttgttgagcacggtcggcttctggaacaggcccttgagcgccgggaacggcgggcggcatctcggctcgccgcgcttgccctcgatggaggtcatcagcgcggtttcctcgccgcagacgaacgcgcctgcgccgaggcgcagctcgatgtcgaaatcaaagccggaatcgaagatattcttgccgagcaggccgtattcgcgcgcctgatcgatcgcgatctgcaaacgcttgacggcgatcgggtactcagcgcggatgtagacgtagccctgcgtcgcgccaatcgcgtagccggcgatcgtcatcgcctcgatcacgctgtgcgggtcgccctcgaggatcgagcggtccatgaacgcgcccgggtcgccctcgtcggcgttgcagcacacgtatttctggtcggccgcgttggccgccgcaaatttccacttgaggcccgtcgggaagcccgcgccgccgcggccgcgcagaccggaatcgagcatcgtctggatcacctgctccggcggaattttctcggagaggatcttgccgaccgcctgatagccgtcgagcgcgatgtactcgtcgatgatttccgggttgatcacgccgcagttgcgcagcgcaacgcgcatctgcttctcatagaacttcgtctcgttgagggacttcgtcgtggaatcgtcgacgacggtctccttgtagaggaggcgcttgacgatacggcccttgaggagatgctcctcgacgatttcgggtacatcctcgggggtgaccatgctgtagaaagcgccctccgggtaaacgatcataatcgggccgagcgcgcagaggccgaagcagccggtccgaacgacgttgacttccttttcaaggcctttggcgttgatctcctcgtgcagcttctcgatgatcttctcgctgttcgaggaggtgcagcctgtgccgccgcagaccagaacattggaacggaacatagttatacctccttatttctgatttgcaccgatggtgtattctgtgacgacattgccgttgaccagatggtcgttgacaacgcgcagcgccttctcggccgtcatctttacgtatgtagtcttttcgccgttcgcatcgatgacctcgacaaccggctcgtactggcagatgccgatgcagcccgtctgcgtgaccatgatatcggaaagctcgcgctttgcgacctcatcgacgatcgcggtgagcacgggtcttgcgcccgcggcgatgccgcaggtcgccatgccgacgagcacgcgggtcttggcctcggagttctcgcggatattgaccgcggctctcgctttatctcgaattgcctgaagttcagctaatgatttcattttaaagcctgttcctttctgcgccgtgcgcatttggtggttcatgatggtcaggcaccgatctccccgtccatctctaaaagataatcccggatccatgcggaaacctccggctcgctgaaggggacctccccgagctgctcccgaagctcccgcgtgtcgagggcggtatgccgctcggcgccgtccgcgcacgttttcgtgcggatatacacgaaatcgatctcgggattgcaggtgatcagaaggtgcatgacggaggcgatatcgccgagcgggatcatatcgacgtgcgaggggcggaaaaccgccgtcagcgtcgtgccggcgccgggcgccgagtcgatcgtgaacgagccgcccgtcatctccgcctccatcttaaaaagcggtacgccgaggccgaccttgcgggtcgtgcgggtcgtgaaaaacgggtcgatcacgcttttcacctgctcctcgctcatgccgcagccgttgtcctccaccgtgatggcgagcgtgtcggccggaaccgattcctccacccggatcgtcgtgagcgacgcgccggcgcggatcgagttctgcgcgatgtccatcacgttcagcgaaagctcccgcatcgccttacgccgtgtatttcgcgaggatcttatccacgtcctccggcacgaggcggccgtaaacgtcctcgttgaccgtgaggaccggcgcaaggccgcaggcgccgatgcagcggcaggccgtgagcgagaacaggccgtcctcggtacattcctccggctggatgccgagcttcgcgatcaggcggtcgagcaccttatccgcacccttgacataacatgcggtgccaaggcagatggagacgttgtacttgcccttcggggtcagcgagaactgtgagtagaacgtggagacgccgtagacctcctcgagggaaacgtcgagccctctcgcgatttccttctgcacctcgatcggcagataaccgtagatttcctgtgcaccctgcagcgcgggcatgaccgcgccctgccgtcccttcagcgactcgatcagatcgagaagcttctggtgctgctcgggagtatcggtaaacggtatggtactgatacgcttttgcattgtatttcctccctgaaaaaataatggtaagtgttttcaagccgcgtgccgccctttcaggcgcagcgcacccagagcgcgcggcacgtctctttgcattatatcaaaatagatatacaatataattcccctgaggaattaaaagcgaatctttgccattcatctgacgaaaatttcttgaatttttttgccgcaaaacacaaatttttccgtttttcttcgccaaaaaagcatacagattcggtatacattccaaaaatcgtcttttagtttgttcatatttttatcgatattatatatcgatatagatttccttattggcagccgccatttttccgcacattcgccgccgaacgtgcggctgtcggaattccgatattgaaaaggcgggcattatgcgaaatccgcataacgcccgtcaggggtccggctcgaggaagcaccccggcccgcagccgcgcagcacgtcgagcagcgccttcgccgagcgctccggcagctcgacctgcgccatattctcctgcatcaggtgcaggtaatgcgcgtcggaatcgcgcagcagaagcatatcgcgcagctcgggatacagccggcagaccgccgcgcggtccgcgccgtgcgaaagctccaccgctcggaacccggcctccggcggcaccgcgccgagcgccgccgtcatgctgtaggcgttcttatccacgtgcgcgggaaacgccgcgccgccgtataaggccgcgagcgcctgcacctcgttgacgccgatctccgtcgccgtgatcagcaggcggtcgatcttccccgtctcctcgtcccgctcgttcagaatgcgctgctcgccgaaaatttccggccggttcgggatacacaccgtgtgcgccgccgcatattcgtcgaacgcgagcgcgccctccaccgtctcaaacaggcagacgacgtgcgcctcctcggccgtgcacagctccatgccggggatgacgagcacaccggccgcctcgccgacgcgcacggccgccggcacgttttggcaggtgttgtggtcggtgagcgcgaggatctcgcagccgagcagcgccgccatattgacgaggttgttcggcgtcatgtcgtcatccccgcagggcgagaggcacgagtgcgtgtgcaggtcgtaccggtagcgccgcatcgccgtcactccgcgagcgccgccgcgatttgcagcgccgtctcgtaggcgggcagcgacgccgcatacaccgcgacctcctgctggttcgcgcgggcgcgcgcctcttcgtcgagcacggcgtcctccaccagcacgatcgccgaaacgtccgcgagcgtcgcgaccgcgatcgcgttgatgttgcccatcacggtcagccacacatcgtcggccttcgcgcggcccatcacccagctcaaaaggtcgccgcagtagcagccgagcgcctcgcggtccgcgccgccgctctccgtcaaaagtttccagccgagcttttcggccagcacatcgattcgcatgttcacaccgttcctttccggcgccgggcgccgtcattccgcgttgttcgggtaaatgccgccgtcgagcttcgcgatcgtatccgcaaagcgctggatctccttgcgcaggatgaagatgcagtcctccttgcggcagttgccgcgcaccacgtcctccgcaaacgcgcggcaggtcggcgcgccgcacgcgccgcagtcgagcccgggcagcgactgctccacgccgtcgatctcgaccatcatctgcatcgcgcggccgatgtcgtccgaaagcgtcagcacatttgaaaactccagctcgccgctccagttcatctcccgcggcaccggggcgttctgctcgaggtggctctgcgaaaccggcaggtaccggcgcaggcgctgcaagcgcgcgatcgccacatacgggttttcgacgcacagcacgccgccgacgcagccgcctgagcaggcgttcagctcgataaaatcgagctcgccgatgcgctcgtcctcgatctcctccaaaacgcggatgacgttctcgatgccgtccgccgcgaggtatttttccttcagcagcgccgaagattcgccgcccgacgacgcccagctcacaccgaggatgcccgagctcgagagcggctccacggcctccgggctgagcttatccatgcggtttgaaagctgcgggaagatctcgctgatcgcgatcgcgccgtccaccttcgaccgctcgatgccgatcggcatgcggatgtccgtcaccttcgccgggcacggcgtgatgaagaagcagccgatcttttcctccggcaggccggttttctctttggcccgctgctttgcgatcgtcgcggccgtctccatcggggagagcagcggcagcacgtggtcgcacaggtcggggaaccgcacgcggatcaggcgcacgatcgccgggcaggccgagctgatgacgggccgcttgagcgcgcccgcgtccatcaggcggcgcgtcgcctcactgacaagctccgccgcgcccgcgacctcgacgacgtcgtcgaaaccgagctttttcaggccggtcagcacgtagtcctgatcgtctaagttgttgaactgcccgtagagcgacggcgcgggcagcgcgatgttgtatgtaaaattctcgagcatcgaaagatggtcgtgctttgcgcgcttcgcgtggtgcgggcagattcggatgcactcgccgcagtcgatgcagcgctcgctcgtgatgaccgccttgccgttccgcacgcggatcgcctcggtcgggcagcgcttgatgcagttcgtgcagccgacgcacttgccctcatccagcgtgaccgagtggaaaaagattcccatcgcctacgcctcctcattcattcagtaatcgccgcttacggcttcgtgctctgcgcatagacgaccatccgcagcgtcgtgccctcgccgacgacggagtcgatcgtcatctcatcggagtattttttcatgttcggcaggcccatgccggcgccgaagccaagcgagcgcacgttgtccggcgcggtggaccagccctcctgcatggccttgttcacgtctgcgatgccggggccgtggtcggtgagaacgatcaccaccttgtccgtgtccacatcgacggccgcctcgccgccgcccgcgtgaatgaccatgttgatctcgccctcgtacatcgcaatcgcgacgcggcggatcgccgtcgggttgtagccgagcttcttgagcttgtgcttcacatcgcccgaggcctcgcccgcgcgggtaaaatcatctccggggactgaatagcggagctgcagcatactcatgatacgtcgcacccgcctctcagcccgttttcaaaaaggagcccgcacgccgtaaacatgcggtagggcgtcgcgaggatcgtgatgtccttctgctccgcgaggctcagaaccggctggtccggccgcttgccgcgcacgaagatgatgcagtgcatgtccatcatctccgccgtgcgcaccacctgcgggttcacaaggcccgtcaaaagcacggattggtccttgacgaacgcgagcacatcgctcatcatgtcgctgccgcacgccatcttgacctcctcctccagatttccctcgaccagaatttcagcctttaaaataccgatgatgtcctgtaccttcataatctaacaatcaccctttcaccgtgtttcggagcgcctgtgccctgcacccgctgatatcgcctcccattatacacaatatatgcaaaaaaagcaacgcagatcaaaaattttcaatggttttcataactgcggggcggcaggcccgcttctgccgccccaagctgttgacgaccggcggacacgcgcgtccccgtgtgcgccggtcgagcaccgttttcaaaaaggatgtgctgttttcctgacaaaaacacatgtatctcctataaaaacaaatttcttcttgacttttccctttttgcgtgtatataataaaacaaaacttcatcgcgctaaattgctgcgtgaagcccgaacaaaaccagaaaggaagatcttactatgaatcgcgtgtacaacttctcagccggcccctcgatgctgccggagagcgtcctcagaaaagctgcggcggaaatgctcgattacgagggcagcggacagtccgtcatggagatgtcgcaccgatctaaggtctacgacggcatcatcaagggcgcggagcagcttctgcgcgaggtgatgcagattcccgataactataaggttctcttcttgcagggcggcgcttcctcgcagttcgcgatggtcccgctcaacctgatgacgaagagccgcaaggccgactacgtgctctccggccagttttcgacgaaggcctacaaggaggcctgccgcttcggcgactgcaaggccgtcgcctcctcgaaggacgacaacttcagccgcatcccggcgctcgacaaaaatgagttccgccccgacgcggactacttccacatctgcatgaacaacacgatctacggcaccgtgttccagaagctgcccgataccggcggcgtgccgctcgtcgcggacatttcctcctgtattctgagccgcccgatcgacgtctcgaaattcggccttttgtacgctggcgcgcagaaaaacgtggccccggcgggtctcacgatcgtcatcgtccgcgaggatctgatcggcgagccgcagccgggcacgccgtcgatgttcacctacagcctgcacgcagaaaacgacagcatgtacaacacgccgccgtgctactcgatttacatgtgcgggctcgtgctcgaatggatcaaaaacgagatcggcgggctcgaaaacatggagaagcgcaacgtcgaaaaggcgggcctgctctacgatttcctcgaccgctcgaagcgcttcaagggctgcgccgaaaaggacagccgctcgatcatgaacgtcacgttcgtcaccggcgacaaggacctcgacgcgaagttcgtcaaagaggccgccgatgcgggctttgtcaacctcaagggccaccgcagcgtcggcggcatgcgcgcgtcgatctacaacgcgatgccgcgcgagggcgtcgaaaagctcgtcgaattcatggaaaaatttgaaaaggagaatgcgtgatgcacaagatactctgcctcaacaaaatcagcccggtcggcaccgcccgcttcggcgcgggctatgaattttcgaccgagatgcaggaccccgagggcatcctcgtgcgttccgccgcgatgcacgacatggcgctgccgaagtcgctgctcgcgatcgcgcgcgccggcgccggcgtcaacaacatcccggtccagaaatgcgcggaggcgggcatcgtcgtgttcaacacgccgggcgcgaacgccaacgcggtcaaagagctcgtgctcgcggcgctgctgatgacctcgcgccggatcatcccggccatcgagtgggccagaacgctcaaggggaacggcaaggaggtctcgaagctcgtcgaaaagggcaagggcgcgtttgccggccccgagctgctgggcaaaaagctcggcgtcatcggcctcggcgcgatcggcgtgctcgtcgccaacgcggcgcagacactcggcatgcaggtttacggcttcgacccgttcctctccgtcgatgcggcgtggcacctctcgagcagcatcacaaaggccgcctcgcccgacgagatcttcgcaaactgcgattacatcacggtgcacgtgccgctgaacgacgcgacccgcggctacatcggcgccgaggcgctctcgaagatgaagcccggcgtgcggcttctgaacttctcgcgcggcgagctcgtcgatacggcggcactgctgccggcgctcgagagcgggcgcgtggcagcctatgcgaccgacttcccggacgacgcgctgatcggcgtggaaaacgtgctcgcgattccgcacctcggcgcctcgacgccggagagcgaggacaactgcgcggtgatggccgtcgaccagcttcaggactacatcgacaacggcaacatcacaaattcggtgaatttcccggcgatttcgatgccgcgcggcgccgaaacgcgcatctgcatcgcgcaccgcaatatcccgaacacgatcagcgcctttacgacgctgtgcggtgaagcgggcatcaacatcgaaaacatgctctcgaaatcccgcggcgattgggcctacacgatcctcgacgtttcgaacgatgtggacgcagagctgctcgaaaagctcgaggcgctcgaccccgtcgtgcgcgcgcgggcgatctgattggcgctgccggccgctgaaagcgttttcagccggcgcgaaaaaaacagttgacaaatcgaaaaacggtgctataatgcaaagcaagaaccgaatacatcgaaaggcattgacgaggaagagtacgcgcgaaaggatgcgcagagagggagcggccggtgtaagctctcgtgaaagcgcgcggaaagtgacctccaagctgtgaaccgaacggggctgcgccctcagtagacttcaacgggatttccgccgtgatcggaaaacggtatcggacagcgcgctgtcccgcaccggtaaagtgcagaggctccctctgaaattgggtggtaccgcggacaatgttcgccccaagcagtacattttgtgctgcttggggcttttttgtatccggtcgaaattttttctagggaaaggatgctgcatcatggaaaaattctacagcttcgcgcagatcgaaaaggagacgcaggccctctggcgcgaaaacaacatctaccggttcgaccccgattcgaaagccccggtctactcgatcgacacgccgcccccgaccgtcagcggcagcctgcacatcggacacctgttctcgttcacgcaggccgagatcatcgcgcggttccaccggatgcagggggaaaacgttttttaccccttcggtttcgacgacaacggcctgccgaccgagcggctcgtcgagcgcgagcagaacgtccgcgccgccgatctgccgcgcagcgactttatcgccctctgccgcgagacaagcgcgcgctacgaaaaggaattccgcgatttctgggaatcgctcggcttttcggcagactggaacttacagtaccgcacggtcagcccggctgtgcagaagctcgcgcaggagaaattcctcgagctcgtccgcatgggcaaggcctatctcaaggaatcgccggtcctctggtgcaccgaatgccgcacctcgatcgcgcaggcggagctggaaaccgccgaccgcgaaacggccttcagctatctgccctttacctgcggcgatgagacgatcgaggtcgcgacgacgcggcccgagctgctgttcggctgcgtctgcctgtttgtccacccggaggacgcgcgctaccggcggtttatcggcaaaaccgcgcgggttccgctctacgatttcgaggtcccgattctcacggacgaaaaggcggaccccgaaaagggcaccggcgcggttctgtgcgccacgttcggcgacagcaccgacgccgcatggtacgcggagcacggcctcccctaccgccgtgttttactgccggacggaaaaatcgcgcccgaggtcccgtacctcgccggcctgcgcgtcccggcggcgcgcgcggaaatcctgcggctgttcgaagaaaaggggattctgctgcggcaggagacgctcacccacgccgtcgcgctgcatgagcgctgcggcagacccgtcgagattttgccctcccgccagtggtacatcgacattttaagcgaaaaggaccgctttctccgggccgccgacgagatccgctggtacccgccgcagatgaaatctcgctacaccgcgtgggtcgaaaacctcaaatgggattggtgcatctcgcgccagcggtatttcggcgtcccgttcccggtctggtactgcaagtcgtgcggccgccccgccttcgccgcgccggagcagctgccggtcaacccgctcgaaacgccgtatacgggcgcgtgcacctgcggctgcaccgaatttctccccgaaaccgcggttttcgacacatgggccacctcaagcctcacgccgctcatcaacgcgcagaacggcctgccggcgctgccgatgacgatgcgcacgcaggcgcacgagatcatccgcacgtggacgttttacacgattgtccgcagcctgtatcacaccgggaagctgccgtggaaggacctgatgatctgcggcttcgtcctcgcgaagcccggcgagaaaatgggcaagtcgaagggcaacgcgctcgaccccgccgcgctcattcaaaaacattcggcggacgccctgcgctactggaccgccggcgcgaagctcggcaccgacacgctcttttccgaaaaggagctcgacggcgcaaagcggttcctcacaaagctgtggaacgccgcgaaattcgttttcgcacagctcgccgattacgcgccggacggcgcggcgcccactttgcccgccgaccgctggatgctcgcccggtgcgcggaaacggcagaaaaagccgccgccctgctccgcgcctacgagcctggccccgcgcgccgggagatcgacgcgcttttctggcacgacttctgcgacgattacctcgagctcgtcaaaaaccgcctgtataagccggaaacttacggcaaggccgcccggcgcagcgcgcaggccgccctgtacggcgcgttcctctgcattttgaagctttacgcaatctacgtcccgcacatcaccgagcatctgtacgggctgtatttccggcagtttgagggcgcgctctcaatccaccagctccgctgggacgcgccggccgagccggacggcgcgctgctgcgtttcggcgccgttttgcacgaggcgctcgccgcggcccggcgctgcaaggcggagcgcggcctctcgatgaaggcgcccctgccctgcctgacgctgccgcgcggcgagagcgagcccctgctgcgcgagacggagccggatctgcgcgcctgcacggcggcggagcggatcgaatacgccgcgccggaaaatgccggttgacaaggcgcatcggtgctgttataatacaaacagaccgtcggtttgtaaaaagaaaggcgaaacactatggcaagaaacaaatacccggaggaaaccgtccagctcattctggacacggccgcccggctcttcatggaaaagggctacgacggcacctccctgcaggacattctcgaggaaacgcacctttcaaagggcgcgatctaccaccacttcaactcgaaagaggacattttcgagcgcatttgcagccggatcggcgaggagaccgaggcgcggctctccgccgtgcgcgatgatccggccatgaacggccgcgaaaagctgcgcgcgctcttccgcgcctccatcctgcacccaaaccagcagaaggtgctggacatcgtgccctacctgctcgacaacccgcgctttctcgcgatccacatccgcgagctgtacgagcttgtcgcgcccgcatacgtcgagccgattttgaacgagggcgtcgcggacggttcgctacacgtcgaggacacccgcgccgtggcggaggccgtcatggtgctgatgaacgtctggctgaacccgctgctgcagcccaccgcgccggaggagacgcgcgcgcgctgcgcggtgttccgccggatcaccgcgtcgatggggctggaaatcatcgacgacgagatcacagaggcgtacgtccgctacacgaaccttctccgcggcacgccggaatgagccgatctctgcactgacaccggaatccagtgattcacatctctccgcttttcccggcgcgcaccgcaggcataccgccctcgtcggcggcatagcgcggcggagcgaaccgcgctgtacggaaacgcggcgcgggccgatctgcaagcggatgatttccggcggcgggcggggtgagaatcattctccccgcgcggccgcgcgtctgaagctgccggcgagccgcatggcggccattcccggcggccacgtccccatataaaataagctgctccgcggagcagtttattttgaggattatacaaaccgacggttggtttttaatagacagccccgatcaaaaccatacatacaaccgaaaaattcaaggaggaatgcagtatgacagaggaaagattcgaacgcgcgatggagcacttcggcagcgcggtggaaaaaaccgccgagcgcgcggccggtgcggtcgatcgctcggtaaacagggcatggcgcttccggcccgtgcgcatcgcgggaaaagcggtttccctctgcgccggcctcgggctgatggtaggcgccgccccgctcgaaagacacggctgttccaaggcggcgaggctctgcctgattgcaggcggcgccgccgttgccgcccagcttatagaggcgctgctcttcagaagaaaatagccgcagaaaagccgcccgctgcctccggcatttcaccgccgcagaaccaaccgattgcacacaaatggaggaaaactttatgaacacaagccgcagcatccgccctaaaagcacctttgccccacagccggaaaaaccgcgcctgttccgccgcgatttcacgctcgtcgtcatcgggcagatcatctccctgttcggcaacgccgtcctgcgcttcgcactgccgctccacctgctgcgcgaaaccggctcctccgcgctattcggcgcggtgacggcctgctcgttcgtcccgatggtcgtcttttccctgctcggcggcgtgatcgccgaccgcgtcaataagcggaacatcatggttctgctggacgcctgcaccgcacttttgatcgccgtgttttatctcgcgctcgggcgcgtcccgctcgtgccgctgatgtccgccgtgctgatgctgctctacggcatcgccggcgcctaccagcccgccgtgcaggcgagcatcccgcttctggccgggccgagggcgctgctgcgcggcaacgcggtcatcaatatggtcggcacgctttccggcctgctcggccccgtggcgggcggcgtgctgttcggcgcgttcggccttcgaccgatcctgattctcagcgccgtgtgctttgcgctctcggcggtcatggaggttttcatccgcatcccccacacgcgccgccgcaaatctgccggtctgctcgccgcggccgccggcgacctgcgcgagagctttcggtttatctcggccgaaaagcccgcctttctttcggtcattctgcttctcgcgctgttcaaccttgtgctctccgccgcgctcgtcgtcggcataccggttctcgtcgtgcagtcgctcggcctttccgacgcggatctcggcctgacgcagggcgcgatgggcctcgggggcttagccggcgggctgctcgccggaaacgccggtgaaaggctgcggctgcgcagcggctccgccctgctctccggctgcgcgctcgccgtgctcgcgatgggcctcgccctgctgcccggcgtaccggcgcgggccggcttctgggtcatcacggcgatgagctttctcgcgatggcggcggcgacggttttcacggttgccctgctgaccgccgtacagcagcaaacgccggagcgcctgctcggcaaggttactgcaagcgttctcgccgtctcaaactgcgcgcagccggtcggtcaggcgctgtacggcctgctgtttgacgcgctggccggcgcgccgtggctggtcctcttcctcgccgccgtgctggcgctcgccgtcgcgctcggctcccgcagtgttttcgcacgcatggaggcggaatccgggcacgcgcggtagagccccttttcacaaaagcagaaggatccgcaaaagcccgagggccccgcggatccttcccttttatccggccttttgcatgcgcagaagctgtgtgatgcgcagtacaacctcgagctcgctggcaccctcgggaattgacgcccaaaatgcctgcgctttggaatcctccgaccgctgtgcggcggcaagtgcttcacggataccgccgagcactacgtctccatccacaccgtgctggtcggctacgcgcatgatcagtccattgctctctgtgtttttcataaatggtcatcctttctcgtcgagcgccccggcgcagcgctgcgcgcgaaggccctttggtttaaaaatcctgtgccgacgcgagccgccccttaaaatccctgctttttcgacgcgcgaaaaacggaagatttcccttggattttgctgctcgctgtcagatctgcgatgactctgtcggatttcgcaagctcattataacaagccttttccgcagtttcaaacaaaatcgttcgctctctttcgacacaatcggacggattcatagctttttccgtaaaagatctttcttttccctacaaaccgccagatatagttacaaaaaattcatttttcgccacggattgtggttatctgtcggaaaagccgacgcgcataccgggggcctgcccggcgcccggaccgccattctgcgcgccgccgttcatgtccggctgcccgccaaagccgcccatgccggaaatatctccggaaacgacgcctgtgcattcaacctgcgcggcctgcgcgccgtccacgaaaatcgtgtacgtctcgccctgcgtgatctccggcgcgctgcacaccacgaccgaaaatgcctttggcgccgtgtaggcggcaagcacgctgccgtccgcgtcccggatctctaccgcgcttccggcgctgccgctgcacgcggcgcacagcgtgttctgcgcggaatcctcttccggcgtttccagcatgccggcgctgccggttcccagcagcacaccgccgttgacggtgaaggatgtgccgctgtcaaaaataccgtttgcgctgtctgtcgggccgctgaccagaattgtgccgccgctgacggtgagcgtgccgttcgaatccagcccgtcgccgcccgcattgaccgtcaccgtgccgccctcgaaagtcatcgatttcgttgcgtcccccgcaaatgcgtcgggcccaaaccgcccgttctccgcggagctgtccgtgccgccggccgcgttgaagccgtcgtccgaggccgtgacatcgatcgtgccgccggtgacgaggatcacgcccgcctcgacgccctcgtagctctccgcaacggtgatctccccgccgctgatcgtaagcgtatcgtcggcatggatgccgtcgtcgccggtgcgtgcggtgatcgttccgcccgaaaccgaggcggtcccgttgctgtgcaggctgtcgtccgcggcgtccagcgtcagcgtgccgccggtgaccgcaagcgccgcctcagccttgatgcccttcatcgaaaccgtatcgctttcttcggccgcgccgccgaacatagcattgccggtttctgcctgcgtattcacaccgccgcccgccgtgatttccagagcgccgccggaaaccagcacgctcgtctccgcctgaatgccgtcgcaatccgcatcaatcgagaccgaaccgccgccgatataaacaaagcccttatccgcctcggcctttgtggccttgatgccgtcgccgcccgccgtgatgcgcagcgtgccgccgcggatcaggataccgtcgttcgccacaaggccgtcgtccgccgccgtgatttccagtgtgccgccggtaatgcgcaggtcgtcctttgtggagatcgcgtcgttcgcaccggcctcgatgcgcagcgtgccgctgccgttgatcgataggtcgcacgcggcgtagatcgcgccggtcagcgtgtcctcgccgtccgtgcccgtcacagcatccgccacatagctttcggttccctcgggcaagctgagaatcaccttgtccgcgcttttcacatagaccggtgcggtcgaggcgctggaaatggatgcgttttcgagcacaaggcgcacatcgtcgttttcaccggcagcgacgacgacctgcccgtcggcaagcgtgccggtcagcacataggtgcccgccgccgagatcgtgaccgtgctgccggagaccgaaacgccgtcggccgcctgcggggcggagaggtcaatctccaccgcgcccgcataatcactgtattcatccttgcccttaaatgtgagattctcctctatcaccggccctatgacgccgcccgtcgcgccgtcggcgccggcctgcgcttcggctgtgcccccgctttccgccgccgtctccgccacgttcgccgcgccgctttcggccccggcgtccgcctgcggcaccgtgcacccggcaagcagcaccgtcagcagccatgcggccaaaaccgtgcttttcttttgcttcatctcgttcacccatgcctttcttccgaaaaaataaggggggcggggcagtcctttgcgccctgccccgctccgtcaaagctgctccgccggcgtcagcgggcggccgcagcgcacctcgaggttgccgttgcggcagcgcagcgcgtcaagaaacgccttttcccgccccgcgttgcgcaggcgcacgcggtagcgcagcttatacaggctgccgaggctcgcggttttgacctcgatgagctctgcctcctcggtaaacgccgcaaaaatatcgtcgaagatctcggtatagtcgagattttcgggaatcgtgacggacagctctctttcaccgctgtgcccggcgcccacgcgcagccgcacaagcaggtaaagcgccgcgcaggcgatgagcgtgaacagcgccgcaatcgccacgtacccgctgccgcaggcgagccccgccgccatcgagaggaagatcaccgcgatgtccttggcgttgcccggcacggaccgaaaccgcacaaggctgaacgcgccggccaccgctacgccggtgccgacgttcccgttcacgagcaggatgactgtctgcacaatgaccggcagcaggatcagcgtgagcacaaagctctgcgtataccgcgcacggcgcgtgtaggtgaatgcgatcgccgcgccgagcagcagcgacacggcggcgcagatcaaatagttttgtaccgagatgccggtactcgtcaggcttgcaaataaatccatttcagtctttcctttcaacccgtctttctgcggccgcgtttatccggccgctctggcggcgcagcggctggccgcgccgtatttagaaaaggaggtcgggtaaacgccgagcgcgcacagcgcgtccgacagccagagcggcatgccgccgctcgtcttgacttccatcagcgcttgcccgtcccggatcagccgcgcgccggcgtcgccgcagcgcaggtcgagcgcttcgccgcgccagcggatcgcctcgtcgaacgtgacacgcaggccctcgtcctcgcggccgtacagcgcggtgcggtcgtagcacagcaccgcggcgggttccagtgtctcataaaactgcaaaaaccacgcgatttcgcgcaggatctgcccatcctcggcgggcgggcagccgcggcagagccagtcaaacgcctcggcgtacggcatttcagcgcgccgcttgtagacgacgcccctgtattttttcttgagctcgacgaacgccgggctgtccgcctgcggcacgccgtaggtgcgcaggcgcagcttttccttatagaccggcttttccagcgaggcgcgcaccagcctgcggtccggcgtgtcgaaatagatgccgcagaccgtcgagcgcccgaacgcatcggggcgcatgtgcggcgcaagcaccgtctgcaccgcctcgtactgcgcgctgtccagaaggtatttctgctccacccgctgaaacacatccgtaaatgccggcatatcccgttcccccttctgcgtgcgggaacaaaaaagagcgccaccgccgtaacgggacgctcctgctcctgccgcctgtgatacggctattttatttttccaatgtgacggccgggtgaatagcatttgagcctctgcggaaaaatcagagcacaatcaagatcagcggcgtatggccggcctgtttcagccgggcgactgcctcctccatcgcaaacgcccggtccggcggaagctgcggcgcgttgtggaaaacaaagcccgccgccgtgtgcgcggcagcaatgaaatggttcccgcggaaaacaccccggttcttgtagaaaatgaccgcggcgcggcagaagcgcgtgcgcgcctcccagccgtccgcgccgagcgcaaaaagctctgcgcgcccgaagcgccgccgcagccagcgccgcaggcgcagcacgttcatgccgagcagcccgccgaaggacggcagatgcttttgctccatcgaccacagcagcgcgcggaaatccggatttttccccagcgccaccgccacgttatacgcggcgaccgcaccgcagccgctgcgccctacggtggaaagccgcccccaacgaagcccgcgcacactttccgccgtctgccgctccaaatatgcacccatgctgatccctcccgtggaaatatcaaaaaaattgtagcacgtgctgttcaattcgtcaattgccgaaagcgcgcccgcatgttagaatagaaaaaaatttgtgccggagaacacttttccggccatacagcgctcgatagattctgaaatgcaaggggattatattatgtatacgaccgattacttaaagaccttcggcgatacgctcgcgctgccggcagaaagccgcgcgccgctcgccgccgactatgaaacgctgctcgccgcccccggcgccgcggcggaaatgcaggcggccgaatcgctgcttttcggcggcgccgaatgggccgccatcgtcccgcacatggaccgcctgcacgcgtgcagcggcctgcaccgccacaccgtcgattttctgtttctgatggccgcgagcgagcgcctgcgcgccgattacaaggccgcaggcctttcggacgcgctgttctgggatacgatcgccgacctcaagtacaagctgatcgaatgccgcgacgtctacggcatttggggcacgttcgtcgccttctggcacccgtggttttacacgatgcgccgcttcaagctcggccgcctgcaatacgaggcgatcccgttcaaaaacggcacgcccgtcacgctcggcggctataccgtgcagccgggcgacacagtctacaacatgcacatcccgtcctgcgggccgctgaaccgcgaggtgcgctttgcatcctacaaaaaggcgtatgaattctataaaaaggatctcggcggaaagccgatggttttcgtctgccactcgtggctgctctacccgggaaaccgcgagatcctgcccgagacgctcaacatggtggatttcctcaacgacttttacatctacgaatcgcaggcggacgacgtgttccacgacaagtggcgcgtgttcggcaaagactttgaaaagcccgacagcgaactgcccgaggataccacccagcgccgctgcttcaaaaggtggctgctcgccggcaaaaagaccggcagcggcgcgggcatcttcctctacgacggagaaaatttcatccgcgcataaaacggcgggaggcgctttgcggtgtcctcccgcttttgttattcgacggagaattccgcatctgcctctatgcgctgcgactgcatggaaaacgccttgatgatccggtactcgcccttttccagcggctcgaaaaattcgatttcacaggtattttcgccgttttcatcgagaatcatccccaaggcgttgaagctctcgtcccacgccagccggtaccacgcgccgttcatgcgccgctccagcgtgtaaaccgcatcgtaggctataggcagatcagtcagattctgaatttgaagcaccaggcccgcagatgtaaccgtcccctcctcaacggaaagggaaaccgccgtaccgcccgcgcccgtgtaggacgacggcgcataggctatgcttttgcagccggtcaggagaacaacgaacaggggaagcagccatatcccccgctttttccgcacgctttcacacctttgacacgccattgccgacacccctttcctctttcttctatgtgtattcagtataccacgccgcaatagcgcaggcaatcctttaaatcgttcgcgtcgaagtacaagattcacaatttttttaaataacgcagaaaaggcttgacatttcctgcgaaacagcgtagaatgttgatttggttaaagggttatataggttcacgacttgggtgaacgtttctaccggccgccttggggccgactataacgcgccgctttgcgggcgtatagccggacagggcggcctttttctgcacacggcacaaaacacagggaacagcggcacgcaggccgcccccgcagaccggaaaggttgatttttatgaacacagacatcctcatcatcggcgccggcccggccggcatcttcaccgcgatggagctgctgcgccgcggcagccgcaaaaaaatcacgctcgtcgaaaagggccgctcgatcagggagcgccgctgcccgaaaccgaaaaccggccgctgcatgagctgcaagccctactgccacatcacgaccggcttttccggcgcaggcgcgttttcagacggcaagctctccctctccaccgaggtcggcggcgacctgccgcagctcatcggcgacgatctcgcgcaggagctgatcgattacaccgactcgatctacctcgaattcggcgcggacgcgcacgtggagggcgtgagcgaaaaggaggccgcaaaggagatccgcaagcgcgcgatccagaccggcctgaagctcgtcgattgcccgatccgccacctcggcaccgaaaaggcacaggagatctatgcggcgatcgaagattacctcgccaaaaacggcgtggagctccgcttcggctgcgcctgcaccgacctcatcatccgggacggcgcctgcctcggcgcgcgcttgcaggaaggcgaaaacgaatacgaggttttcgccgcgcacacggtcgtcgcggccggccgccgcggcgcggactggttcgacaagctctgcgcgcgccacggcatcgcccacgcgcccggcaccgtcgacatcggcgtgcgcgtcgaggtgcgcaacgaggtgatggaaaccgtcaacaacgtgctctacgaatcgaagctgatcggctacccgaagccgttcaagaacaaggtgcgcaccttctgccagaaccccggcggctttgtcagtcaggaaaactacgacaacgacctcgcggtcgtcaacggccactcctataaggacgtgaaatcgcagaacacgaacctcgcgatcctctgctcgcaccacttcaccgagcctttcaaccagccgatcgaatacgcgcaaaaggtcggcgagctgacgaacatgctcggcgcggggcacatcctcgtccagcgctacggcgatattctcgacggcaagcgcacgtggcaggaggagctctcccgctctaacctaaagcccacgctgcccgacgccgtcgcgggcgacatcacctcggcgatgccgtaccgcgcgatggtgaacatcctgcatttcatgcaggcggtcgatcacgttgtgccgggcttcgcggccgtggagacgctgctctattcgccggagctgaaattctacagcaaccgcgtcaagatggacgcagacctcagcacgagcgtgcggaacctgcactgcctcggcgattcgagcggctggacgcgcggcctgatgatggcctccggcatgggcgtgctgatgggccgccggctcgcggcggaaaattaaattcgccgcccgtttccgccccgcgcgccttgcaaccgcccggcttttatgctatactgaaccgagcagttatacaaattaaaggaaagatggttttatagatgaagctgggtattgtcggccttccgaatgtcggaaaaagcacactgttcaatgcaatcaccaacgcgggcgcgcagtccgcaaactatccgttctgcacgatcgagccgaacgtcggcgtcgtcgcggtgccggacaagcgcctcgacaagctcgccgaaatgtatgagccggaaaaattcacgcccgcgacgatcgagttcgtcgatatcgccggcctcgtgaagggcgcctcgaaaggcgagggcctcggcaacaaattcctctcgaacatccgcgaggtcgacgccgtcgtgcacgtcgtacgctgctttgagaacgacgacatcatccacgtcgaaggctcgatcgacccggcgcgcgacatcgagacgatcgacctcgagctgatcctcgccgacatcgaggtgctcgaccgccgcatcgacaaggcgaagaagatggtcaaggccgacaagaagtaccagctcgaggtcgatttcttcgagcgcgtgcacgcggcgctcgacgccgggcagccggcccgcagcgtggaatgcaccgaggaggaaaaggagctcctctccaccgtcagcctgctgacgaacaagccgatcatctttgcggccaacatgagcgaatccgattttgcggacggcatcgagaacaacccgggctatttggcagtgaagaagatcgccgacgcgcagcacgcggccgtgctgccgatctgcgccgagatcgaggcggagatctccggcatggaccccgaggaaaaagcgctgttcctcggtgacatgggcctcacggaatcgggcctcgaccgcctcatcaacgcctgctacgctctgctcggcctgatctcctacctcacggccggcaagcccgaggtgcgcgcatggacgatcacgaagggtacgaaagcgccgcaggccgccggcaaaatccacagcgactttgagcgcggcttcatccgcgcggaggtcatcgcgttcgacgacctgatggcctgcggcacgatggccgccgccaaggaaaagggcctcgtgcgcagcgagggcaaggagtacgtgatgcaggacggcgacatcgtcctcttccgcttcaacgtctgatttcggccgccgcgcggcggtccgtctatcctccccacataaagcaaggagcgggtacatggtgtgcccgctcctttttgccgttttaccgccgcggcgtcagttgctcccgccggtcggcatatacgggcggatgcgcccgcagaactcggcgaaattctgcgtctgcaaaatcacgcgccccgggccgatgagccgcgtcaaaaacagcccttcgccgccgagaaagatattcatgccgccgcgcacggtctcgacctcgtagcccaccgtgccctcaaacgcgacgacgttgccggtatcgacgcgcagcgcctcgccgggcgcgagcatcttttcgacgctgctgccgtccacctcgagaaaggccgtacccgcaccgctgagcttctggaggataaagccctcgccgccgaaaaagccggaggaaaagcgcttcgtgaacaccgtatcgagcgcgacgccgctctgcgcgcagaggaacgcgcccttctggcagatcatcccctgccactgcgcgacgtccacaggcatgatctcgccgggcaccgtcgcggaaaacgcgatttctgcgccagctgcctgcgccgtgtatgccgtcataaacatcgattcgcccgcgaacagccgcccgagtcccttcataatgccgccgcgcgcgttcgtctccatcgcgattgcatcgctcatccatgccatgccgcccgactgcgtgtagaccgattcgccgtattcgaggcgcatttcgaccgcaggcatcacgttgccgatcacccgatactgcattgaaaaccaccctttcttcgtttcctctggaaacggtttctgtctctatggtagcagatcgtcaaaaggctgtcaaggccgcaggcgcggcacgcaaaaatccccggcgctgcgggtgcagtaccggggatctccgttttcagttcggcgctatgccgttttgcttcaatcagatgatcgcaagcaggatgaaattcaggatgaacagaatcgtcgcgacccagaggatcggatggatctccttcgccttcttcttgcagatcttgacgatgcagtaggtgatgaagccgaacgcgatgccgtaggaaatgctgtagcagagcgccatgaagaggccggcaaagaaggctgggaccgcttcggagatgtccgtccactcgatttccttgaaggccgaggtcatcatcacgccgaccgccacgagtgccggcgccgtagccgcgtagggaatcgcgctgacgaacgtcgcaaggaacgcgctgatcgcaaagcagatggcgacgacaacgctggtgaggccggttctgccgcccgccgcgatgccggaagcgctctcgacaaaggtggtcgtattggaggtgccgaagatcgcgccgattgacgtagccgtcgcatcggcaaacagcgccttatccatcttggatttgaagccggagctcttatccatcgttttctcatcttcctcgctgaagatgccggcgcggcggcccgtgccgataaaggtgccgatggtgtcgaacgtatcggagatgctgaacgcaaagatcgtgatgagcacgagcgggagcttcgcgatgtcgttgaacagggacggcaggccttccgccgtgaagatcgcgccgaacgtggtcggcagcgccgcacatgcctcggtaaagctgacggagtccgccatcgtcgttacgcccatcgggatgccgatgacggtcgtcacaaccatgccgatcaggatcgcgcccttgacgttgcatacaagcaggatgatcgtcagaaccagaccgatgaggaacagccacagcgccggctggttcagcgtggcaatggccggtacgccgctgtcaaaggtgatgacgccgacattcagaagaccgatgtacgcgacgaacacgccgatgccgccgccgatcgcattctgcaggctcttcgggatcgccttgatgatgtacttgcggatcttcgtgaccgtgatcacaatgttgaacagaccgcagatgaacaccatcgacagcgcctgctgccaggtgaagccgaggccgaagcagaccgtgtagacgaaaaacgcgttgaggcccatgcccggcgcctgcgcatacggaacgtttgcgacaaggcccataatcagtgtgccgatgatggacgcaatgatggttgcgaggaacacggcgccccattccatacccgcctggctcagaatgctggggttaacagcaatgatgtaagccatcgtgaagaacgtggtaaggcccgccataatttcggtggaaacctttgtcccgttttccttcagtttaaaaagaccgttcatgaaaacttcttttcccctttccttcggcagacaaagccggtgcttcggcccgccgcacccgttcggcgctgggcgcgcggtccgtttccccttccctgtctgcccgcccgtaagtatttgtggcgtgcatgcccggcgcggacggcccgcaggcccgacgctgtccggacagacggcggaaacgcagcgtctgcggcgcgcgaactgccgccgcaggaaagcacggccgctttccgctttttccggcccggaatacccagccgaaatcgaacatttatagtataacggcttgttcacaggaaatcaagagaaaaataaaagaaaagtcacattttattcacaagatgttcaaaagcgtcgaaaaagggatgccgcccggccaagggctgcgaagcaaaaacagccggcgcgcctgccgcccgggctgcgcaccggctgtaagccgtaaaaatcagaccagcttcagataccgcacgccgtagggcggcagctccacgcggccgttcaccgcgacggtcttgcccgtgagcagatcctgcgccgtaaaactgccgcgcgcatcgatgctgcacggcgcgttttcggcgttgactgcgacgagcaccgtctcctcggggcacgcccgctcaaaaagcaggttcttgttctggatcgtcacgttgcggtaatcgccgaaattcagcgcgcggctttcgcgcttgaccgccgcgagctttgcgatccactctgtcagcgcgttttccgcgggccgctcgaagcacgggcgcaggtcgccgtcgccccggcacttctcgccctcggcgccccactcgctgccgtagtaaaggcacgggatgcccggcatcgcgaacagcacgccgtagagcggctcaagctggtttttatccgtcaaaatactcgcgacgcgcgtgacgtcgtggttgtcggcaaaattcacaaggtgcttgccgcggtacagcgtccacggctcggggccgaactgccggccgagcgagtgcgcgatctcaaagagattcatcgagttaaacgcggagtaaagccccttgtaacactcgtagttcgtgacgctgtgcagcacgccctccgccgtgatgcggttgtaatcgccgtggatcatctcgccgatcagcacgaagtcctgctttttcgcgtcacagaaggcgcgcaggcggcgcatgaagccctcgtcgagcatatacgccacgtcgaggcgcaggccgtccacgccgaactcgcggatccagccctcgacgcagccgagcaggtagtcggcgacggcggggttttgcaggttgagcttcacgagctcgtagtgcccctcccagccttcgtaccagaaaccgtcgttgtaggcggagttgccgccgaaatcgatgcggaaccagtccttatacggcgaatcccagcgcttctcctgcacgtcgcggaacgcgaagaaaccgcgccccacgtggttgaacacgccgtcgagcacaacgcggatgccgttctcgtgcagcgcgcggcacaccgccgcaaaatctgcgttcgtgccgaggcggcagtcgattttcgtatactcccgcgtgtcgtagccgtggttgtcggactcgaacaccggcgaaaaatataccgcgccgacatgcagttttttcagatgcgggatccagtcgatcacctttgcgatgcggctgacgcacacgccgtcgttcggcatcggcgcaccgcagaagccaagcgggtaaatctgataaaatacggtttcataagcccacatgttgtttgcttcctccccaaatatgttgattttccagtttatatcgctaaggaccagacacgttgatccggattaaatctgccggcacagtgtatccagtatgatgcgcggaaacacggtactgcgcgtaaaacggcggtattcctgttctgcttcggtccgcccgcccatcagagatttatgcgtaatcgtgttgtcagagacactaaagatggccgcaagagaaattcccgccagctttgcggcgcggaatgccacggcagtttccatctcgatcacattgcagcccattgcgataatttccccgatatgcgcaaattgggcaaaaatcgtatcgatgctgaaatttcgtcctatatgatagtttacccggttttcttcacagatgcgggctgtattgttcagaaccgtttgaagcaaaccagcatcgggataggctttttctccaaacacatcgcctgcatgcaatgcgtcggccgcgatatagcggctcgcaccatctccgcagatgctgtattcggggatgacaacgtcaccgattccaatatcggcgtcgagcgcaccaacggagccgatgaacagcatgcgtttgcaaggtgttacccccaaggacagcagtgtatccatcagtaccggtgctccgatccccgttttgatatacgtcatatgcaggccgcattctttattgaagatgtcccacactttgatgctcggcgatgcagacggactgaggtctttgacctccccgagctgcggaaacatcgcgggctcccaccacggtgcaatcagcacattttcctgtatgtgatcggacggaacgcccaattgattcatgcaaagatcttgatcctgtacgccatatctgcggattcccgcaagcaaatcctcatacttcatgggtacctccggaacagtgcgtttcataccttgccgctcagcgcaatcgcctttttgttgagcgcgcggaagcgttcggggatcttttcgtcgatcacgcggcagagctcctcggccgtgaagccaagcacgccgcctttcgccgccgcgccgagcagcgcgaggttcagcactttcggcgagccgcacgccgcgcagaccgcgtcgccgttcacgaccgtcaggttttcgatgttctcacgcaggtagccgagcatcgcgtcgccgctgtagctgcccgagagagaatccgtcaccggcttgatcgcgcggctgttcgtgacgaccgcgccgcccggctttaaatagcgcaggcagcgaacggcctcagccggctcaaacgcgaggatcaggtccgccgcgtgctccggaatgagcggcgacgcggccgcgccgatgcgcacgtggctgacgacgcagccgccgcgctgggccatgccgatcgtttcggccgtgtgcgcgccgagcccgcggttgatcgcgcactgggcgagcagcttcgaggccagtacggtgccctgaccgccgacgccgcagagcagaatatccttcgtttccattacgctttcgcctcccctttcattttcccgatcgcgccggccgggcacacctgcgcgcacaggccgcagcccgtgcagagcgacgcgtcgattttcaccgtctcgccgtcgcggtagatcgccgggcagcccagcgctgtgatacatttcttgcagcggatgcacgtttcaccgatcgccatcgtgccctgcggcttcgtaaccgcgatgcacggcgacttatagatgatcgccgaaacacccttgaccgtgtaggcgtgcttcgcggcctccaccgcggctttcaaatcgagcggatcgacgatctgaatatccgagacgccgaccgcctccagaatcttcgggatactgaccttttcggccacgtcgcccatcatcgtcacgccggtgcccgggtggggctggtggccggtcatcgccgtcgtcgagttgtcgagcacgacgaccgtaaggtccgtgccgttgtacacggcgttgatcacgccggggatgccggtgtggaaaaacgtggaatcgccgatgaacgaaaacgcgtggcggtccggctcgccgcggtgcacgccctgccctaccgtgatgcccgcgcccatgcacaggcaggtttcggtcatgtcgagcggcatcgcgttgccgagtgtatagcagccgatgtcgccggcaaagacgcacttcttgccctgcatcgcgaccttcaccgcgtagaacgacgcgcggtgcggacatccggcgcagagcaccggcgggcgcaccggcagcgccggcggctcgggcagcgcgccggccgccgcgggctgcgcaaggccgaggtaggcggcgagcacggcctttacgctctcgttcgtgttctcgccggccgcctgcacgtcatccgtcagcttgccgcgcacggtaacgggcagatgacgcttgccgcagagcatcagcagcgcgcgctcgaggacggggtcgagctcctcgacgcacagcacctcctcagcgcccgcgagaaatttttcggcgagcgattccgggaacgggaacggcgtcgcgattttgagcacgcgcgtgtcggggtcgccgagcgcgtgcagcgcctctttgacatacatcgcgttgacgccgccggtcacgatcacgcgcttcgcctgcgcgccgcctgcgccgtacgtttccgcggcgttgcggctgtaggcggaaaagtcccgtgcgatctcggggttgcgcgcttcgatgcgcgcgtgcgcctgcaaagagagcttcgggaaaatgacccagcgcgggtccttttcaaaatgtcccgcggggatttcccggcgcgcctcctccacgtcaatgacggcgcaggcgtggcagacgcgcgtcgtcgggcggaagagcaccggcgtgccgtacttttcggagtagtcaaacgcctcgccgatcatgtaatacgcctcctccggcgtcgcggggtcgaacaccggcagcttcgaatactgcgcgaaggtgcgcgtgtcctgctcggtctgcgaggagatcgggccgggatcgtcggcgacgagcacgaccatgccgcctttcacgccgatgtacgcgaggctcatcagcgggtcggaggctacgttcaggccgacctgcttcatcgtcaccagcgcgcgcttgccggtgtacgccgcgccggcggccacctcaagcgcgaccttttcgtttacggaccactcgacgtagacgtcgcccgggcgcgcctttgcgatcgtctcgagcacctcggtcgaaggcgtgccggggtagccggacacaacgcccacgcccgcgcggatcgcgccgaggccgatggcggcgttgcccattaaaagttccttcatgtttcagcccttcccttcctgaacggggaaccgtacgcaggcgctttcgcccgcaccggctcagaatgtataaacgccgtccgcctcttggcggatgtcggcttcataaaaagcggtcatcgcgcgcaccatgtagtcggtgtcgagcgcgccggcggtttccacgcaggcgtgcatcgcgagctgcgggatgccgatgtccaccgtattgagcgagaggtgcgcgttcgcgatgttgccgagcgtggagccgcccgccatgtccgaacggttgtggaacgccatcaccggcacgtcggcgcggcggcagatctcgccgaaaaccgaggcggaaaccgcgtcggtcgtatatttctggttcgcgctgtacttcacgacgacaccgccgttcagatagcagcggttcgtctcgtcgcacttcgcggcatagttcgggtgcacggcgtgggcgttgtcggccgaaagcatgaagctgtccggcagcttttcgagccattcggcctccccgatgccgagcgccgcgcggatgcggcagaccgtgtcggtgaggaacgtggaatccgcgccctgcttcgtgcgcgagccgacctcctcgttgtcgaacacggcgcagataatgagcttttccgcattctcggcggcgaggaacgacacggcggccgaaaacgcgcactgcaaatcgtcgagccgcggcgcgaggataaattcgccctgcgcgcccgccgccgtgcctttctggcgcgggtagaggaacaggtcgctcgagagaatatcctccggcgcggcgcccgcggcctcggcgacaagcgccgtgtagtcggccttttcatcgccgaacagcgggagcagatcgacctgcgggttcagcttctggtcggccatgccgcgcgtcatgtggatcgcgaggctcgggatcacgagcaggtcgcggtcgatgttgacgagcacgctctttacgcccgtttcggtgcgcacgacggcgcggcccgcgagcgaaagcgggcggtcgagccacgaggagaggatcatgccgccgtagccctctgtattgagctttttgtaatgcccctcgaccgtgatctccgcgccggtcttgacgcggaaggtcggggaatcgctgtgcgcggcgacgatctgcacaccgttgaagcgctgcggcaccgagaacgcgatcagtgcggaaccgttgcgcagcacgaagtagcgctttcccgcctcaagcttccacggccggccttccgaaagccgcgtgcagccggcggcctccagcatgccggcgaggttttcggcggcgtggaagcacgaggggcttttgtcgatgaactgaagcagtttttctgtcgtttcgtttgctctctgcatcttgattttcctttccgtaaaggggttatccgaacatccaagggatgattttttccacataggcgctccagaaattcatgtcgtgcgcgccggcgccgcaccgcccggcgcgtccgcgcggcaatcgttcgggatcatcatgtcaaaaaacgcctgccggcgcagcgcgtttacatagagctcgattctgaaattcgccataacagccgtacctctccgcataaaaaatgatttcttttcgattatagcacaaaataagggcaatgtgtaccccctaaagggaaacagcactgccctgaaagctctgtttttttacagcccggcggcgatcgccgcattcaccctttcgcgcatctgcggcaggtaatccgcggtgcgcgggtaatcggaaaacgtcataccgcgccccgcgccgaggcactcgagcgccgcctcgcggccgctccggctctctaaaagctcgagcgcgcgctggtcctgcagggccatgagaaacaccttgaggcgcaccgagcacagcgggccgtccgctccggggtagacggagaagccgtcgccgcccgggaacgcgccgcccgcgtccgtcacgcggaacgggtcgatcacggccttcgaaagcgccgtgtaccagaaattgaagccccactgcagaaagcccgccgcgccgtgcttccaaagctgcgcgccgaggatgcggccgcggccccgcggcatcgcgagaaagcggttgcccacgtccacgcactgcccgcagcagacgtacgcccacaagtccggcacatggttttcgagaaacggcgcgatatggtcggtcgcgacgatcggatgctcgacgacgccgcgcgcgtaaaactcatagttcgagagcgcgtcgcggatcgtacagcccgcgagcagcggcgccgcgatcgattttgccgcgagatagctttcgaggtgctcggcgcccggctcgtcggaaatatggaatatgaggtcgcttttcgcgacgccctcgccctcaaaaaacgcgagcagcgccggcagcatctgcccgagaaacgcggcgtattccgggtccccggccgccgtatgccagccgaagcgcagcgaccgaacgccgttttccgaaacgtagatattcggggcatgcgccgcgccccactgcgtaaagaggtgggagatctcaaatttttcgatgccgcatgcccgcgcgaggcggatccaccgccgaagccggtcgaagccgaacgcatagcgcccctcccgcaccgcgatgtcgagaagctgggtgcacggccgctcgccgccgaccgccgtgtcgagcgcgggcgtgagcaccggcgtcagcagcacgttgacgccgtggcacgccgtcgcgcgcatatatttttcgatcagcgcccagtgcgccggcgagtagatttcgaccttgtgcagcgaggcgatgcagtccgcgtggaaccactgcgtaaagcagaggcgctgcgccggcaaagcggcggggatcaccgtgaggcggaaaaccgcgcgctgcccgcctgcctcgagctcaaccgcatacgtgccgccgggcgcgtcgccgtccacgcgcaggctgatccagagcgtctcaaagccgtcgacctgcaccgcatcgccctcgagcgggtacaacacgtcggggaacagccccggctccgtcgtcaggtagtccgcgtcgtgccggtcggggtacgccgcgagcgcgcacggcacgaagccgatgcgaaagatctccgcatgcaccggcgcgtccgtccgcagcacggggcggcacgcctcctgcccggtcaaaacggcctgaaacgccgtttcctccccccgcagcgcgctgcacgacgtgtacggcgcgaagctctccggccgaaagaccgtctccatcggtgaaaccagttgtatccgcatcatgcttcctcctcgcagggctcatcgaactgcgtgaaatccggcacataccgggctttggcggcgctgcgctcctgacagaagccgtcgagcccgagcgccatcatgtggtcgagcaccttgcggtactcgcgcgcggtcacgcggcggttgacgtccgcaaactgcgcctcctccggcacgcggcccatcggcacgtactgcgccatcaggctgaccggcacggcggggaactccgccgcgagcaggtcgagcaccgcgagggaattgcgcgtatgcgccggcagaatcaggtgccgcacgacgacgcccctttgcagcaggccgtcgccgtcgtacacgttttcgccggtctggcgcaccatctccagcagcgcgcggcgcgccgtctcccggtagtccggggcgtttgaaaggcgaacggcgagcgcgtcgtccgcatatttgaagtcgggcaggtagacatcgacgagcccctcgaggctgcgcagcgtctccgccgattcgtagccgccgcagttgtagacgaccggcacgcgcggcttatactgccgcagcgccgcggcgatctgccccgcaaaatgcgtcggcgtgacgagattgatgttgtgggcgccctcgctttcgagcgactgcatcagcgcgatgaactccgccgtgtcaaaatcgcgcccgtgcgcattttccgccgagatcgtactgttctggcagaacacgcagcgcagggagcagcccgtgaagaaaatggcgccgctgccccgtgtaccgctgaccggcggctcctcccaaaagtggagcgccgcgcgggcgatgcgcagcttttccccgctgccgcagtagccgcgcgacacggcgcggttcgcaccgcagcggcgcgggcagagcgcacaacccgtcattcggcgacctccccaagcatcaggaacgcggcgttcgagccgcgcttgccgcgcgtgacgcggtgggaaaagacgaggtcgctgttctccatcgtgcacacgccgccgaccgtgatgcgctccgggcgcatgccgcaggcgagcatataccgccggttgcattcccagaggtcgacgtggaacttgccgttcccgtcgtcggtgacaaacgcatcgctctcgggcagcgcgaggaattccgccgcgcagggttcgtcgacctcaaagctgcgcttcgagatagacgggccgaccgccgcgagcaggtcggcggggtcggtgccgaactcggcctgcatcttctcgattgtcgcctttgccatgccgttcaccgtgccgcgccagccggcgtgcgagaggccgatcgcgcggcgcttcgggtcgtagaagtagagcggcacacagtcggcgcagtagacgagcagcggcagccccggcgtgtcggtcacaaggccgtccacgctctccatatccttcggtttccagatgccggtgccggcattttccatcgtgacacggcgcacgaccgtgtggtggtcctgcgcgcccgccgtgatgcgctccgccggaatccggagcgccgccgcaatgcgccggaaattctccgcgacgttctcgtcgctgtcgccgcggccgaaacctaggttcatcgccgcaaattcattccggctcacgccgccgatgcgcgtcgaaaacgcgtggacgaccggcaggctctcccatgcgccgaacgcgagcaggccgacgcccgcctcgattttaagctgcatattttcgatctgcatcggctccgcctttctcggcttctcgatcttcggcagggggatcgtctttctcgcgaccgtgatcccctcgtatttctgcttcacgcgcacctgcccgcagaattcatagccgcagcgcgtgcaccggaagaccgcgcgcaggcccttgttcttcacactccacttgccgcggcgcttcgtctcgccgccgcacttctcgcaggtgaagcgcaggtgctgccgctcgatgagcgggctctccgggtcgcagatatagctcgtcttaaatgtgatccggcggtaaaactccgggtccgtgcagtcctgcacgtgcgggcggaagctctcgcgcgtgtagagctttttcaggatcagcgcggagagcacgctgtcgtcgagcgcgcggtggtggtcgagcgcgccgtcatcgacgccggaaagctctgccgcctttgaaaggccgagctgctccttgccgtccagcccgagcatctgctcgcagtacacctgcatgtcggcgtagcgcgcgagaaacggcaccgtcgctgaaccgccgaagtagcggcagttctcgatcagcgccaaaatatccgaggtgccccaggtcgcgatcacgcagtcacccgcccatttgcggaagcggctgaccacctgcataaaaggcatcgcgtcggaaagattgtcgtccgtgatgctcgtcaggtccgaaatgaccgtgctgatcttttttgtgacctgcggcttcacaaagcacgagaaccggtcggtaatattcatttttttatcgagcttgaccgcgccgaactcgatgatctcattgataaatccgcggagcttgcggctgtaggcgccgttccactccaaatccaaaacaactatattcatctggcctgtgctttctttaaaacaatcggttgataattcgaaaatgatatgcaaagcgcggctgccgtgcccgccggaagcgcccgaaggacgcgccccccgcgccgatttccttggaaaacgagcttgtgcacacaagcgatcccgcggacacccgccgcgggccgtgcccgccttatttctttttggcggcctgcttcatgcgcagctccttcgaaagaacgaccttgcgcatgcggatgctctccggggtgatctcgacgagctcgtcgtccgcgatgaattcgagcgactgctcgagcgagagcaccgtgtgcggcgtcagcttcagcgcgtcgtcagagccggaagcgcgggtgttcgtcgcgtgcttcttcttgcagacgttgatcacgatgtcgtcgcccttcgggttgctgccgacgatcatgccctcatataccggcacgcccggcccgataaagaggcggccgcggtcctgcgcgtaaaacaggccgtacgccgtggattcgccggtctcgtgcacgacgatcgagcccgtgctgcgctgctggatgtcgcccttatacggctcgtagccgtcgaacacgtggttcataatgccgttgccgttcgtgtccgtcaaaaactccgagcggtagcccatgatgccgcgcgccggaatcttgaactcgaggtgcgtcgtgccgctgtcgcgcgcgcccatgttgacgagctctgccttgcgcgtgccgagcttctccatgaccgcgccgacgtagctgtccggcacctcgatcatcagaagctcgatcggctcatactttctgccgtcgatctccttgtagatcacgttcgggcgggaaacctgaaattcgtagttctggcggcgcatctgctcgatcaggatcgagaggtgcagctcgccgcggccggataccttgaaggtatcggccgactccgtttcctccacacgcattgcgacgttcgtctcaacctctttgaagaggcggtcgcggatgttgcgggaggtgacgtacttgccctcgcggcccgcaaagggcgagttgttgaccatgaacagcatcgaaaccgtcggctcgtcgatctttacgaacggcagcgcttccacatgctcggggtcgcaggccgtctcgccgatgttgaggtcggccatgccggaaaccgcgacgatgtcgccgagcgccgcgctctccgcatcgacgcgcttgaggccctcgaactggtagagcttcgtgacgcgcgcgttgcgcttttcatcgctcgtgctgctgcagatcgtgacggtctggccgaccttcacggtgccgcgctccacgcggccgatgccgatgcggcccacatactcgtcgtagtcgacgttcgagaacaaaacctgcgtcgggccctcgaggtcgccctcgggcgccggcacctcgttgacgatcgcctcaaagaggggcttcatgtccgtgccctgctccgcggggtcgttcatcgcgtagccgtcgcgcgcggaggcgtagacgaccgggaactcgagctgctcctcgtcggcgccgagctcgatgaagaggtcgagcacctcgtcgatgacctccagcgggcgggcgcccgggcggtcgaccttgttgacgacgacgaccggcttcttgccgaggccgagcgcctttttcagcacgaagcgcgtctgcggcatgcagccctcaaacgcgtcgaccagcagcagaacgccgtcgaccatcatcagaatgcgctccacctcgccgccgaaatcggcgtggccgggggtatcgacaatattgatcttcacaccgttgtacatgacggctgtattcttcgagagaatggtgatgccgcgctcgcgctcgaggtcgtttgaatccatgacgcgctcggccacgttctcgttgctgcggaaaatgccgctctggcgcagaagctggtcgaccagcgtcgttttgccgtggtcgacgtgcgcgatgatcgcgacattccggagattttctcttttgcccatacgtaaccattccttttcctgtttcgtttttcatccttcatccgttcggccggccgcgggaaatgcggcgcggcgcgctctcgggccgattgcccgctaaccgtaatagtataccactttccggccgttttgtgaatcccccgcgccttgtaaaatccgctgaaatcaactggaattgcaggggctcttttgtcctgcttttcttgacggcgcagcgcgaacgtgctatgcttatgctataagcgccgcacggaaaggaagggcaccatgaaaaaaattctgaacttcggctctctcaatatcgattacgtctatgcggtagcgcacaccgtgcgcggcggcgagaccgaggccagccgcggcctcgaggtctttcccggcggcaaggggctgaaccagtcgatcgccgcagcgcgggccgggctttccgtctttcacgccgggctcgtcggcgaggacggcggcctgctgctcgacacgctccgggcggacagcgtgaacacgcgcttcgtcggcaccgtgccgggccgcagcggccacacgatcattcaggtggatgaacgcgcgcagaacgcgattttgcttttcggcggcgcaaaccacgccgtgacgcccgcctatgccgacaaggtgctcgcgcacttttcggcgggcgacgttttgctgctccagaacgaaatcagcgccgggccgcatatcctgcgccgcgcggcggaaatggggcttgaaatctggttcaatccgtcgccgatggacagcggcgcgctcgcgtgcgacctctcgctcgtctccgttttcctgctcaatgagatcgagggcgagcagctcgccggcacggcggagccggaagcgatcctcagccgcatggcggaaaagtacccgcaggcggccgtcgtcctgacgctcggcgcggcgggcgcgtggtattcgaaggggcagacgcgcgtgttctgcccggccgagaaggccgaggcggccgacacgacggcggccggcgacaccttcaccggctacttcctgcgcggcatgctcgacggccgcgcgccgcaggaggcgctgcgccttgccgcgaaagccgcggccatcgccgtttcccgccccggtgcctcgccctccatcccgcgtttttccgaggtggagtgcagcctgtgagcttttgttcaaaagcgcttggtttaagccccgcttaaaccaagctgtcttattcccccctgtttttaatccctgtttttcaagaaaggaagcgcccgcccggcgggggctctggtgacacaaatgcgagttgctgtaagaagaatcaacgaatgggacgcgccctccatgctcaaaatctacgcgccctatgtggaaaacacgaactgcacgccggacgaaaccgtgccgcccctcgcggaatacatccagcgcatagaccgctacacctacgggcgcggctggattatgactgaaatcgacagcgccacggcaggcttctgccttttgaccgagcgcggcgtggagccggccgaccggttcacggcggatatccagctctatgtcgcgcccgaataccagcgccgcggcgtcggcgcctcgctctacagcctgatgctcgcgatcatgcaccacgcgaattaccgccgcgtgaccgcccacatcgcgctgccgaacgacgcggccagagcctttcacgaaaggatgggcttccgccccgtccgcgaggaaaacggcgtgctgctgatggcgcgggagatcgagccggaaaacccggaggccgagcgctttacaaagccgtatctgatcgaaaacgaggactacgagcgggcgcgcgagcacgccgcgtcgcttgtgcgcggggccgcgcactgaaacttcctgcgcgaaggccgcggcgctctgtcctccacacacggacaaaacggaaaggagcggaacatgggaccctacgactacatcgtgagccgcatcgacggcgattacgccgttttgctgcgcaccgacgacggcagcggggatgagatcctcgtcgcgcgggcgctgctgcccgaagccatcgacgtgggcgccgcgctgcactacgaaatgttcacttattccatgccttgacggctctggcacagcggcgttgtatattatacacaatttttccggccgctgatttggatttcccgtgtcttgaacccttgggaaaatcttgttaaaatagaagtaagggcgaatcgcttcccggtccgcccttcatttttgcgttaaacggaggaagaaagacatggcaggaagatccggtgcgatcgacatgacccgcggcaggcccatcagcctgatgctgcgctttgcgctgccgatgatgctcggcagcgtgttccagtccctttacacgatggtggattccgcggtgctcggccgctacgtcggctccgaggcgctcgctgccgtcggcgcgacgacctcgacgacgaatttcatcctgctgctctcaaccggcgtgacgagcgccgtctcgatcgtgatctcccagttcgtcggcgcgggcgacgagaaaaaaatccgcgccggactcgtcagcacggtttacctgacgctcggcatcggcgccgccatgtgtgtcgtgagcatgctgctcgcgcgcccgctgatgctgcttttgaacacgccggaaagcgtgatcgacatgtctgtgctctacatccagctgatcggcgggctcggcatcgcacagttctcctacaatgcggcggcctccgtgctgcgcgcgctcggcgacagcaaaacgccgctgatcttcctcattttctgctctctgctcaacgtggcgctcgaccttctgagcgtgctcgtttttgagctcggcgtggcgggcgtcgccggcgccacggtgatcgcgcaggcggtctccgccgcggtctgcatcgcctacatgttcaaaaagcacccgcagctccgcctgaaaaaggacgatttcaagccggatacggcggttctgctgcgcatcttcggcatgggcgcgcagatggccttacagggcgcgctgctctccgtcggcatgatggtcatcacgcgcgtgatcaacggcttcggcgcgaacgtggtcgccgccttcacggtcggcagcaatgtgcagaacctcgccgtcatgctgttcagcaacttttccttcggcttctcggtctatgtcgggcagaacttcggcgcgcggctggccggccgcatccgccgcggcgtgcgcgagatcttcctgctcgtcggcggtctctccgtgctcgcgagcgcgctctccctgatcttcgccgagccgctcgtcctgctctacgtaaagcccgaggaaacacaggtcatcgaggcctcgctcagcttcgtgcgcatccagtcttggtttttcccgttcctcgggtggatctggctctacaacagcacgctgaagggcatgggcaaaatcggcgtcacgatgatctcctccttcgtggagctcggcagcaagatcggcctttcgatcctcctgcccatctggatcggctacaccggcatctggttttccgcgccgatcggctggatcctcggcctgatcccgaacttgatctactactacggcggcttctggcagagagcgcttcccccgctgcccgaggacgcgccggcggagcccagccctgaggccgcaggctgagcgctcgcgcccggcgccgcctgcctgcgcgcgcgttttctccggggcggcccgcagcctgccttgaaagaaatccgcccgcttttcggcctctcgcacgcgcccggcttctccccaaaacaaacggaaccgctcccggcttttcggccgggaacggttctttttatttctgcaaattgcgctcgaagcgctcgaaatagccgatcagcacgccgttttcgtcgcgcacggggttgatgtacttgcgctcgttgtaaacgctgacgccgagatagatctcgttgccgtggtttttgagtttctccaccgccgcgatcagcatctccttcgatttctccgagtggcactcgaagatcgattttccgatcaggtcgccgtagccgcgcaccatgtaatagtggtgcttcgcctcgcggttcatgtagcggatgatgtggtccgtatcgacgaacacaatgcggtacggcacgctgtcgagaatatacgccatcatttcctctctcgtcactgaaaacaccctttctatttttgcggggcgggcaagcgcgccgcagccgcgcgctcatgcctgccggatcaccgaccacgcctcggtcagcctctcgaggctccacgcggcgttcgcagggcttgtggagggcagaaccgtctccggcagtctgacgccctgcgcctgatgcttcccatacagccggtgcgcggtctgcccgttcgtgtagatgtgccgaatctccgcctgcgacaaaatgcggctgaggtcgttcggcacagcgtcccggatgctcgcatccgaggagcccgcgatcgcgcacgaggcgatcacatcccacagcgcgatgcggttttgaagcagcagcgcgcgcttttccccgaccgtctccggcgccggcgcgccgcacaccgcggcgatcacgcgccagaagcggttctgcgggtggtggtagaaaaacatcccctcccgcgatttgaccgacgggaacgagccgaggatcaaaacgcggctctttgcatcgaacacgggcgggatgttgtgcagaaccttttccatcagcgcaccttttcggcaaagtccttcttacgctgcgcgtaggcctccatattctccttttcgaaggcgagcggcacgtcgcccgcgccgatcagccgcagcaggtatttcgtgaacggcgggttcatcacgagaatcggccccacgaggtaggtgccgaagaagttgtgcaggcggatgccctcccacgcggccttcgggttcagccccacgcccttcgtctttttgaaaaggccgagggattcgtccggcgtgtaggccatcgtgaactgcgtcttgaagcccatgacggtctcgccctcaaaggttccctcgaaatcgctgttgtggcggtgcatcatgtcgcgctttgcaaagaggcggtacaggccgaggcactcgatgcggccgccgtcctccgtttcgatgtagtcgccgaaaacctcgagcgcgttgccggtgaagagaaacacggtgccgctctcgatcgccgcgcagatcttctccttcagcgggcggagcctttcgatcacgcgcgcctgcatgcgctcggtcatcgggcccatgtagacaaggtcgattttctcctcggtgaagcgcaccgtgccgccgatcggcgtgcggataaactccgcctgcggcagcgttttttcaaggtagatcatgttgtacgtgtcgccgaagaggttgcagaactccgggaacaggatctctattttcatttcgaggcagcctccttcccgctgtcaagcagcttctggcggatctcattcgcaaggcggatcgtgtagacgtcgtagaggatgaacacggtgtccgcctcgggcgtaacggcggcaggcgcgtcgttttccccgcgcatgtggacgatgcgctccgccgggatgcccgcgagcagcgcgcgcacgtaggtatcgtggtggcgcgcgccggcgatgacgacctgcacgacgctctcgtcgttcaaaaattcaaagtcggtgtcgtagaaccaagcggtgttctcgaccgtgtggcgcgcgtcgaagtagtcgtcgagaaacaggatgacggcctttttccccggcgcgttgcggatgttctcaaacgcgcgcgagcaggcgatcgggttctgccccttcgcgaggtgcaggatgattttgcggccgttcgcctccgtttcggagtagcgcgtctcgctgatgcccatcttccggaaggatttttcaatctgctccggcgtgaggccgaactcgcgcagcaccgcgacggcggccagcgagttgtagatgttgatgttgttcgcattcgcgagcgggtaaacatccgcgcggccgtccttttcgacggtcatctgcatgtgctcgatatcgacgtccgtcgcgcggtaatcgggcgccggcgaatggtagccgcagctttcgcagcggacgcggccgatgtggtggtagcgcacgacgtcgtgcgtgagcgggccgaagcaccgcgggcagaccggcacgtcgttgacgatgttgtcgcacaccgtcttatcggtatcgaggcggtcgatgccgtagtagacgcggtcgttttccggcgcgatcgcgctgcacagcgggtcgtcggcattcagcacgagccgcgtccccttcgggatttcgcggttcaaaatatcgaggataaactcggcgtgcgcattgcgcttgtaggaatcgcggaaaatattcgtgcagagcagaatatccggctgcatgtaagggaaaaatttcggtgcggagcgctcgtccatctcaaacacggcgagcttgtgcttcggcttgccgaaaaatcggctgttcgcgatcagcgtggaggcgatgccggtgtgcacgttcgtgcccgagcggttgcagatgaagtcgatgccgttgtcctcgagcacgtcctcgatcatgttcgaaacggtcgtcttgccgttcgtgcccgtgatgccgatgatcttctcgggctttggcatgcggccgatgaaatcggggcagaggatgatcgcccacgagcccggcatcgaggtgcccttgcggccaatcagcttgaggacgagggccgtgccccgtgcgaacaaaagggcaaaataaaagcgcaggtttcgtttcatgcgtaaaatcacgttcctttttcggaattgcttttgtattctgttgtatcataccattttgcgggcggcttttcaagcgcgcggcggcgggaatcggaaaattgtgcggataaagcctaaaattcataaattcccgtagactttttccgaaaaatcctgtacaatattttcagatccaaatttatttcacaggaggagttcaccatgaagaatttacccgtagcggtgcaggtttattccgtccgcgacgacgccgagcgcgattttaagggcacgatgcagaagctcaaggaaatgggctacgacggcgtggagcttgccggcctgtacggcatgaagcccgccgaggtgaaggcggttctcgatgaggtcggcctcgtcccgctctccgcgcacgtcccgtttcaggagcttgccgccgacatcgagggcaccgtcgcccagtataaggaaatcggcatgcagtacatcgcgatcccgtacctgatggaggaggaccgcccgggcaccgagaagttcctcgaaaatatcgagatcttccgccagatcggcgaggcctgcaacaaggtcggcatcacgctgctctaccacaaccacgatttcgagttcatcaaaatgccgaacggccagtatgcgctcgattacatctactcggaaatcccggcctcgctgctccagaccgagatcgacatctgctgggtcaacgtcgccggcgaggttccggccgactacatcagaaagtacacgggccgcgcgccggtcgtccatctcaaggacttctacaaggagggcaagcccgccaacatgtacgagctgatcggcatcgagaccgagaagaaagaagaaaccggcaagttcgagttccgcccggtcggctacggcatgcaggacattcccgccgtgctcgaggcttccatcgacgccggcgcgaagtgggtcgtcgtcgagcaggatcaggcctatgagcgcgcgccgctcgacgccgtgaagatgagccgcgagtacctgaagtccctcggctggtaatcaaaccgcagaggttaggttccggcacacggcaggcttttcggaatccgccgaaaggcgaagccgtccggccgccaaaatacagctaaaaaacaccgcgcagcaggcatttccccgctgcgcggctattttttgcgccgttccgccgcagcccgcgcacacaaaacgcagattccgcggggagctggtatggcgcagacgccgaaagggtcccggagcgaccggctccggaacccttttccgttctatggattgtaccgcttacagcaggcttctgtacagcgcggcgatctcctccacggaggtgtcgcgtgggttgccggggcagcacgcgtccgcataggcgctctcggcgaggaactgcacgtcctcctccttgaggatgcccttgaggtcggcggggatgcccacgtcggcgctgagctgcttgacggccgcgatcgtcgcattcgccgcttcctcgtcgcccatcgcgtcgatgccctcgatgcccatcgccttgccgaccgcgcggtagcgcgcaccggcgaccgaagcgttgtactcgaggccggtgggcaggatgatcgcgcaggcgacgccgtgcggcgtgtcgtacagcgcggagaggccgtgcgccatcgagtgcacgatgccgaggccgacgtttgagaagcccatgccggcgatgtactggccgagcgccatgccctcgcggccctcgggcgtgttctgcaccgcaccgcgcagattctcggaaatcaggcggatcgcctcgaggtggaacatgtcggaaatggcgcaggcgcccttcgtgatgtagccctcgaccgcgtgggtcagcgcgtccatgccggttgcggcggtgaggcccttcggcatcgaggccatcatatccgggtcaacgaccgcgatttccgggatgtcgttcgtatcgacgcagacgaacttgcgcttcttctccacgtcggtgatgacgtagttgatcgtgacctccgccgcggtgcccgccgtcgtcgggacggcgatcgtaaagaccgcgtgcttcttcgtcggcgcgacgccctcgagcgagcggacgtcggcgaattccgggttctcgacgatgatgccgatcgccttcgcggtgtccatcgaggagccgccgccgatcgtcacgatgcagtccgcgccggagcgcttgaacgattccacgccgtgctggacgttctcgatcgtcgggttcggcttgatctcgctgtagatttcatacgggatcttcgccgcgtcgagcaggccggtaaccttctgtgtcacgccgaatttcagcagatccgggtcggtgcagacgaaggcctttttatagccgcgcgcctgaagctcctccgggattttctcgatcgcgcccttgccgtgataggaaattgtgttcagtacaattctgttgaccattttgaaccatcctcctgactgattttgtatatagtttgatttggtgggaaaacgaagcttcggcaggcatccattcaaagtttcattcatcctgccatgaattatacagatctccggtaaatgctgcacacttgttctaccgcccagatttgatggggaaaaaacagtttttgtctgatttcatccggcgttaaccataccaaatggtgatctggctcactcggttctgagacgacgtcgccaatctccatataatagaaatatcctatggcgcggaaatccgttttcatatgctctgcaaaatggtaataatcgcctttgcatacaaactttttcgggaacactgaaaggccggcttcctctaggctttcccgaataatacaatcctcgtgcgtctcgtcgttttcaatgccgccgccaagcaaaaaataacctttttcgccgttatccagatgcgtcattgcagcaggtatcttgccgtcggaagaaaaacctatgccatatgcgccagcgcgttctttgtacaccgcatcggccttttttacgccaaatgttttttctaccataatgacatacccctgaaccggattttctatttggtttcagtatacacccaagttgtgaatatgtcatgacatttcttgtaaagtctgtaaattttatggagccgctttaaaccgcggcctcccggctcagtccagaaacgcctcgttcagcgtcacgccgaattctttggcgatcgcgcgcaggttgtcgtcggtgatcgtctggcggatctgcccgccgcccgccgaaagcgccagcaggtagatctgcgccgctttctcgatcgtgtgcatcaggccgaacgcggtgtcgaaatccggccccgagacgaacaggccgtggtgcgcccagaccgccgcgtcgtagcgcttcatcagcgcactcgtcgcaagggcgatgtccgcgccgccgggcaccatccactccacaacgccgacgccgcccgggaacacgaccgggcactccgtcgcgctctgccaaagcgcgcgggtgaagtcgcgcgccgtgagcggcaggatgtaggtcatcgcgatcaggttcggcgtgtgcgcgtggtagatcacgcggtacgcgccgtttgtcgccgttttgcggacgctgtggttcaaaaagtggctcggaaactcgctcgtcgggtgcgcgccgtcctcaagaccccagacgatgcgccagcggtcgcccgccgcgttgatttccacaatgccgatattgtgcgcaggatcctcctgcacgttgcgcaggaattttccgctgcccgtcgtgataaaatactcgccggcgaggttctccgccgaaacgcccatcgcgttccattcgcgcggcgccgtgaaaaacgggcggcacgcttcggcctcctcggggcgcatgcggtaggtgaggtttccgccgttgcgctcgtgccagccctgctgccagccgtcgccgcacatgcgcataaagccgcggatcaccggttgctctgtcatcatccgtatcatctccgtatcgaattctatatcaggcgcgctttgaaagcacgtccttttcatactgcatcacacgctcgagccactcgaggtcgtccgccggcacgccctgcccctcgcagtagcgttcccaaaccgccgaaaacggcatcgtcttgagcttttcggaaagcaccatcagcgcggtaaaatccgctttgtcctgcaaatcgcgcatacgggcgttcggctgcaaaagcgcccagagcagcgccttttccatgttgcgcgtgccgacgacccatgccgccacgcggttgatcgaggcgtcgaagaaatcgaggccgatcatcacgcggccgagcgcgtcattgcgcacgatctcctttgcgatctcgcgcagctcgtcgtcgaacagcacgacgtggtcgctgtcccaacgcacgggacgcgtcacatgcagcggcaccttgtcgaaaaagcagagaaacgccgggatcttgtcgctgacaaactcggtcgggtggtagtggccgttgtcgagcaggtcgtacacgcccgggtgcgacgcggcgtagctcaggtaaaactccgcgctgcccaccgtgtagctttcaagcccaatgccgaacaccttcgactcaacgcagtcgacgacgccctcaatcttctccgcgaagatctcgtcgaggctctttttcaggcgcaggcgcggcgccatgcggtcggccggcacatccttaaagccgtccggaatccagatgttgttgagcaccggcgagccgagctccgccgcgatccgcccggcgatgcggcggcagcgccggccgtgctccacccagaacgcgcgcaccgcttcgtccggcgaggagagcgtcaggttatctttgaccatcgggtgcgagaaatacgtggggttgaaatcgatgccgaagccgtgctgctttgcaaacgccacccacggcgcgaagtgctcgtactcgatcgcgtcgcggtccaccggcgtgtcggagacgaggtagctcgcgtgcaggttgatgcgctttttgcccgggatctgctcggcagccttcaaaaaatcggcgcagagctcctcgaagcagcgcgcgcggcccgggtagtcgccggtcgcctgaatgccgcccgaaagcgcggccccgccgttttcaaagccgtgcacgtcgtcgccctgccagcagtggatcgaaaccggcacgccggcgagcgttttcatcgccgcgtccgtatcgacgccaagcgccgcgtactgcgcccgcgccgcctcgtatgcgttaaagtccattttgttccctgtcctttctcaatgtctggattttatctaaaatacggtccgccgtctcgtccttcgaaagcagcggcagcgtttcggcctcctctgcggtcagaagcgccacggcgttcgtatcggcgccgaagcccgcccccggcgtgcgcaggctgttcgcgacgatcaggtcgaggttcttgcgccgcagcttttcggccgcgttttcgagcaggttttccgtctccatcgcaaagccgcagagcgtctgccccggccttttgtgcgcgccgagccacgcgaggatgtccgccgtgcgctcgagctcgagcgtcagcgcgccctcccgcttcttcatcttttcggcggcgaccgttttcggccggtaatccgccacggcggcggccttcacgacgatgtcggccccctctgccgcggccttgaccgcctcgaacatctccgcggccgattcggcgcgcacaacctcgacgaacgggggcggctccaccgccatgcgcccgcagacgagcgtgaccgcggcgccgcgcagcatcgcgcgccgcgcgacggcgcagcccattttaccggtcgaatggttcgtgatgaaccgcacagggtcgattttttcagcggtcgcgccggccgtgacgacaatgcgctttccggcgaggtccttttcgcaggcgatttcgcgcaggagccagtcgaacagcacctgttccgcgggcatcttgccgcggcccgtgtcgccgcacgccagatagcccgtatccggctcgatgaccgtgtagccgaaccggcggagcttttccagattgtcctgcacgatcgggttttcaaacatattcgtgttcatcgccggggcaagcagaaccgggcaccggcaggcgcaggccatgacggtcgtcgtcagcatatcgtccgcgatgccgttcgcgatcttgccgatcacgttcgcgctcgccggcgcgacaagcacgacatccgcgcgctttgcgagcgcgacatgctcgacgctgtactggaaattccggtcgaaggtgtcgatcaggcacttgttgcccgtcagtgtctcaaaggtcgtcgggtggatgaaattcgttgcattctgcgtcatcagcaccgtgacgtccgcatgctgcttgacgagcatgctcgcaagccctgcgatcttgtaggccgctatgctgcccgtcacgccgagcagaacggtttttcccttcagcatgtggttttctcctttccacgcggggtaaagacccggatcgggaagctctcgcggatcacgtcgcgcgcgtgctgtacatcgcgcagcgcgccgccggcgatcatctgcaccgcgatgttgccgatcgccgtgccctcggtcgggccggcgtaaaccggcagccccgtcgcgtccgcggtgagctggttcaggtaagcgtcctgactgccgccgccgacgatgttgaggctcgtgaacgcgcgcccggtgatcttttcaagcccgcgcacggcctcggcgtacgattccgcaaggctgtggtagacgcaggagagcgtctgcgccgccgtgggcttttccttgaagccgttttcccgcagcacgacgcgcacggcctcctgcatgttgtccggcgcgaggaaccgcccgtcgttcacatcgacgcggccggggtagtccgcggcgctttccgcgagctttgcgagcagctcgaaatcgaagcgcgtctggccgagctcccgccggatgttctgcagcatccaaaggcccatgatgtttttcaggtagcggtagcggtatgcgtagccgccctcgctcgtgaagttctgcgcgcggctctccgcggtcgtgatcggctcggggttctccacgccgatcaggctccatgtgccgctcgagaggaacacggcgttttcgtcgcgcgccggtacggccagaaacgccgaggccgtgtcgtgggacggcgcgagacgcacgagcgtgtcgaagccggcggcctcgcgcaccgcgggcgtcaggcggccgagcggctcgccggccatgcggaccgggtggaagatgtgcgccggcacgccgatgcgctttaggatctccgcgtcccacgtcctttcgcgggcattcaaaagcgccgaggtgctcgcgatcgtgtattcgttcgcgcacacgccggtcagcgtgaaggcgagataatcgggcatcatcaggaaatgcgccgcgcgctcgagctgctccggcgccgcctgccgcagcgaccaaagctggtacaccgtgttgtacacctgccgctggatgccggtgcgcgcgtacagctcggcaaacggcagaaccgcctcgagcttttccggcacgcccgccgtgcgcccgtcgcggtaagcgaccgcgtcgccgatgcggttgaggttttcgccgagcaaaacgaaatccacgccccacgtatcgattgaaacgctctcgggcagcagcgcctccggtgcacagccggcgagcgcggagccctcgggcgcgccgtgcgccgcgcaggcccgcaggcctgcgagcacgtgccgctgcaggccgtccgcatcccagcagagccgcccgtttttctgcgccgcgccgtttttaaagcgatagacctccgaaagccgcattttgccgtcctcgagccagccgaggatgtggcggccgctggaagcgccgatgtccaccgcgagatatgttttcatttgggaacgcccccttcttgcactttgttgctttcagtataccagaaaaagcgcaaaaaagtaaggacgccgtttaaataaaaaagcgtccttacttttagcctctattccgttcggacaagcagccgcagagccttcccgcggccgcctcctatctcctgcacacgccgtcagccgaggccgcggaataaagccgcagacgcgtaccgatccgccgggtaaaccatgcggacgtaccgccagccgatttcctccatgattgcgccgagcgcgccggtctgcaccagcagccagaaagcgataaccagcgcgagaatcacgctgtagacgatgatcttccgcttttttgtgcgcgggctttcccgaatcctgacctcgtcctcccagtgcaccgagcctgcaaaggcgccgacatgcttttcaaacttcgccttgcattccgggcaggaggaagcaccgttcggaatcgacgcgttgcattttgtacaaatcatgaaatctccccctttgcccgccggccggagcgcatccgctttaccgcgcgccgctctgccgccgggattctgccgcacattctgcctgtgtttccccgctgtgcatcggaatcccctccccacttttctgtaattaaattatatgatatttccgagtgcatgtcaataaataccgtgattttcaaccgacacacgcctaaaaatgcacgcaaaaagaaggaaaatcgattgacacccggcgccggaagcagtaaactgtacgtacaacctgtatccagcagcaaagggcgcgcccgttttccgcacggcgggccgctcctataaaaaacgcgcgctccggcgcgaaaccatcggaaaggatttgttgcagcatggaaaagacagcaaagctcaccgtcgaaaaggattttaaaatcgccgaaatcgacaagcgcatctacggatcattcatcgagcacctcggccgcgccgtgtacggcggcatctggcagcccggccacaagaccgccgacgaggagggcttccggcaggacgtcctcggcctcgtccgcgagctgaacatcccgatcgtccgttatcccggcggtaattttgtatcgaatttctactgggaggatagcgtcggccccgttgaaaaccgcccgagccgcctcgagctcgcttggcgcagcaccgagccgaaccgcatcggcatcaatgaattcgcctcgtggtgcaaaaaggcgggcgccgaggtcatgcaggccgtgaacctcggcacgcgcggcatcgaggccgcctgcaatctgctcgaatactgcaaccaccccgccggcacgaagtacagcgacctgcgcatcgcgcacggtgtgaaggacccgcacagcatcaaagtgtggtgcctcggcaacgagatggacggcccgtggcagaccggccacaagaccgccgcggagtacggccacctcgccgacgagaccgcgaaggccatgaagcagatcgatccgtcgatcgagcttgtgctctgcggcagctcgaacaccggcatgccgaccttccccgagtgggagagcacggcgctcgagtgggcgtacaacagcgtcgattacatctcactgcaccagtactacggcaaccgcttcaacgacaccgcgaatttcctcgcgcagagcgacgacatggaccacttcatcaagacggtcgtcgccacctgtgactacgtgaaagccaagaagcgcgcgaagaagaacatcaacctgagcttcgacgaatggaacgtgtggttccacgccaacgaggccgacgacgacacgatgaagaaccgcccatggcaggtcgcgccgcacctgctcgaggaccactacgactttgaggacgcgctgctcgtcggcctgatgctcatcacgctgatgaagcattctgaccgcgtgaagatggcctgcatggcgcagctcgtcaacgtcatcgcgccgatcatgaccgaggagaacggtccggcttggcggcagacgatctattacccgctcctgcacgcctcgaaatacggccgcggcacggcgctgcagccggtgctctcctcgccgaagcacgacacgctcgatttcaccgacgtcaccgacgtggaatccatcgccgtctggaacgaggaaaaagaggaggtcacggtgttcgccgtcaaccgcagcgtgacggacgacgtcgtgctcgacatcgacctgcgcgccttcgccggcttccgcttacaggagcacatcgtgctggaaaacagcgacatgaaggccgtcaacaccgccgagcagcaggccgtcgcgccaaagaccgtcgcggaccgctccgcttatgagggcgaaacgctccgcgcaaagctcgcgaagacctcctggaacgtcctgcggtttgcaaaataagacagatttccgcccggtcaaaaattttttccgaacgtgaaagattccgcgccgctcaatcgtattgtctatagaacgatttgaaacggaggaatccacaatgaaaaaactgcttatccttgccgccatggctgccgcactgaccgccggctgcatcaccgtctccgcagcgcccgcccgaaacggccccggcttctgccgcgcggcgttcacggcctgcgaagccgccgccgaggaagcgctgctctgcgcgaaccgctgcggccggactcagaacggcggctccgccgaatgtccgaacgacctctgcccgaacgacggcgtgcccgcgcttgacggcaccggctaccggggcggcagaaacggcgcggacggtgattccgcgaacaccgcctgcccgaacggcggcacgcccgcacgcgacggcacgggctatcagggcggcaggaacggcgcggatgacaattccgcgaacatcgcctgcccgaacggcggcgtgcccgcacgcgacggcacgggctatcagggcggcaggaacggcgcggatgacaattccgcgaacaccgcctgcccgaacggcggtacgcctgcacgcgacggtacgggctaccggggcggaaggaacggcgcggatgacaattccgcgaacaccgcctgcccgaacggcggcgtgcccgcgctcgacggcacgggctatcagggcggcaggaaccgctgaggctgaagaggggatcaacatgcgcagcgagcaggaggccatacaggccatcgagcggtatgcggacaccgtgcggcgcatctgcatgctgcatctgaaaaaccacgccgacaccgaggacatctttcagaccgtttttctgaaatacgccctctgccccggtgcgttcgaaagcgacgcgcacgagaaggcctggatcatccgggtaaccgtgaacgcctgccgggacctgctgaaatcctttttccgcagccggaccgtctcgctcgacgatgtcggcgagatcgcctgcacggacgagcaccgcgaggtgctcgaggccgtgctggccctgcccgcgaagtaccgcgatgtcgtctacctcttttactacgagcagtacaccgcctctgaaatcgccgcgctgctgcgccggaacgaaaacaccgtctacacgcagctcaagcgcgcgaaggcccttttgcgggaatcgctgggaggtgatgccgatggataagaagattcaacgcgcctttgaagacgtgcgcgccggcgaagccctgaaggacggcaccgcagctttcctgcacgaaaagctgtatgcgcgcgcccgccgcaccgggatgcgccgcgccgtccccgccgtgtgctgcgcgctgctcatcctgttcgccctgacgggctacggcgtctactcgatgccggtggccgcggtcagcgtggaggccggggagaccgtcgagctgaaggtcaacgcattcgaccgcgtcgtctcctacacctgcctttcgcccggcggggaagacgccgtgaacgcgcttaacctgacgcaccggacgtgcagcgacgccgttgcggcgctggtggaggacagcggcgaagaggccgccgtctccgtcgccgccgacagcgcggaaaagagcgcggcgatcaccgcggaaatcgagacgcgctgcgcgggcgtgacctgtcaggccgccgacgcagaaacgctcgaggcggccgccgaagccgggctcggcgtgcggaaatacgaggcctacctcgcgtggaaagcgctggaccccaccgtcacaccggacgacgtgcgcggcctttcgatgcgcgagatccgcagccgcatcgccgccctctcgccgcaggacgacgcagaaagcaccggcggcgcgtccgcctcccccgcgcccgacgcggccggcacgcaaagcggcgcagggcagcaaaacggcgcagggcagggcgagcagcaccgccgcggccgaaacgaagtctgaacaaaacgagagcgcagccccatgaccggaggctgcgctctttcttcatattcttcaattgtccgtcattcggagctgctcgccctctgccgtcggtccgaagccggtaggcataccgctgcaccgcgccgccgtcgagcgaatagccgaatttatggaactgttactcctcaattcccagcaaccatggtacactgacatgcaaaagactcgcaaaaaccggcaattcataatccggtacaaaacgtgttccaatctcaatgcgacttatactatctctctcaataagaataccggccacctgcatttgcgccgccaagtccgattgagacagcttcaagcggcggcgcgccaagtgaacgcgttctccacatatattctttttcccgttaaaatcatagattttcacgaacttcacctaaaaatgctaattatcagttttttcttgactttagcataatttgaaggtattattgtgttaaagataagaatccaaaacgaaatcggagggaaaaatatgtattacaacggaacggcagaaatctataacgcttggatgaatggcatgtacgagcttttattttggtatgcgcttattgcgcttgcttacttattgatcatcggccttatctggggcattgtcgtacaaaaagttgtggaaaatcgcggctataatgaaaactggtttatctggggatttttcttccatattttcgctctaattgtcgcactgacaaaaccaaaccgaaatgtttatcctcccttatattttcaaccaatcgggtggaaatgccactgcggacttataaactcgccatatacaaaaacttgtgtatgcggcaggcgatatgaaaatgtcgtaaaccaaggccaacaagagtagtcaaaatctctggcacaaagctggtgtttctatagaaaagagaacgtccgcttcctatcaagtcagacgtcctcttttctcattcgcttccgttatccgtcatttggagctgcgcgcagccgttgaacgccgcgaagcggcgcatgcagcgctcgacattggcgcgaagcgcctttgtctcccgcacgccgtcctcgtaccagatgttccgtatccgcatcgcttatggtcttccgttccggttgacttaaaatgaatacgttattatttgcatgtacttaaaattatttcgacaaagaggatcaaaatggacgattgcagaagagagttcaccatagattatgacttaatagaaaagtccaagcaaaaacgggaacgggaatacgaggatttgttctcgcacgaacgttattacaagaaaaaattgccgtctgaatattcgctcctgcacgtagatttcgatccagcctcccgaaggacgaagattacctttatcgaacgcgtgcgttatcgcaccattgagcgatacataacgcagaactacgagaggcatccggaatactcggagtggaaatcaaaggccaaggagatcaccagaagcatccgacttactaacgaagccttggaatcacttcgcacgaatccggaccgccttattgcggattttgcatatgaaatcatctccgcactttccagtaaggagttattaccagcctggtttatccgtcggcagttctgcgaaatggaagaaaatcaagttgcactgcttgtacagaaaaaaaacgaactcagccagcaatgcgccgcggactgccgtcatctgcaggctgagattcggtctacagaagaaacgcaggagcaacacacattcgatttgcaatactacgaaaaagcgatgaccaagtacaacgcaaaaatccataaaattctctgtaagcggcagaataaagcagcttttctcttaaatatcctcagccttttcatccgatatgccctattgtctgaaaagcggcttcaaaaaatcaaagcgtccagaaacgacagttttgaaaaatgtgaacagattaagcaggaaattcatctgaacaaagaaaatattctcgatctgaaaaccaaaatttctgacaaaatgagcgagctgaaagagcaatgcgatgcgcttgactcaaaaattgatcaaattaagaatttctgggaaaagaaaagggttggaatccctaaattacccgcagatattgcgcaggattccgactttttccctttaaaatctctgtccggcatgcgatacacaaaggttattggctgttatgtcattcacaacacagcaaacaacaaatactatgttgggcagtccaaggatgtgtataagcgcttaaaacaacatttcagaggaactgtaccgcaaaactggattttctctgaagattactaccagaccgatcccagtttacgcgaggatttattcgaagttaaaatggttgaatgcgactctaaagatatgctggattcaaccgaaaaagctatgatcgaggaatatgactcttggaacaccggatataaccggacaaaaggcaattcctagtgaatttcctgctgccgcaaacggtattcgcgcggcgtcatgccgtacatttccgaaaatgtgcggtggaaatagctcgtgttttcgtagccgaccatcgcgatgatgtcgccgaccggcagccgcgtgcggcttaaaagccccgcagccttttccatgcgcttgcgccgcagcagcgccttgaaggtcgagcccgtcgcctcgtgtaccgccgcgctcaggtaggagaccgtcacgccgcagcgcgcggaaagctccgtgagattcgcgacgcggtagttctcctcgatctcccgcagcaccgtcatcaccagcgtgctgtgctcgccctcgtcgtccggcgcggtcagacggtcggtgcagttcaaaagctcgaggaacagaagcgccatcgtgttctgcgtgatgcgccgccggtttttcgtctcctgcacgagcgcccagaccatgttttccacaaggttctgcaccggcagcacgtccgccacgcggaacagcaggctatccgacccgccggcgcggcggacggaatctgcgatgaagcgtccgagcgcgttatccgcgccgaccagctcgagcgccgtgtcgaaaaactgcggcagcacgatgaaattcaccgcgatgtcgtcgtagcctgcccgctcgatttcgtgtgaggcgccgcgcccgagaaacagcagctccccggcgctgagcgtcaccggctcgccgccgttgatgcggtgcacggttttgcccgagcacatgtacatgatctcgatatagctgtgcgcatggcgcggaaacggcgcaaagcgcgtgtgcgcgcgcacggaaatcagccgcccgcgctccagcattttttcgctgtccaccgtaaacacggccttggctgtgtaggcgtttttgtcgaccgcgccgccgtcgaggatgcgccgctcctccggcgttatggcgcgcagccgctgcatcagtgcttcctgcatcgcaatcccccaaagcccgctttactcggcagggcccgccgcatccatgatcgcctgaacgccgaaaacgaccgggcggataccgtccgtacagcagacgatggtctggctgtccctgttgttccacggcgcataggtcgcgccggccgcaatggctctgacgctcccgtaaatatcgtgccgcgcccacgggcagaagccctccggcatcacggcgccacccgtgaaaacgaacgtgtcgccgccttcaagccgcgggcacgggccggccgcctcgccctccgtcagataccgctgcgcaagctcgggaaaaaatcccctgcggatccccgtgattttcacctgcttcactgcttcgcctcccatacagcccgattccgcgccgcgcacatcacagaatcagctcgcttttatagtatttttcctgaaacgcgacggccgcgcggatctccgccgccgtgtaccgcgcgcccgccgcggcgacgacccatttgtcctcgcagtcgtcgaagcggtggatgacggcgagcacaacgccgtcgaacgtctcgagcggctctgccggcccgagcacgtacacgtcctgctccgagccgtcgccggccatcacgccgggcacatagccgtaattgacggtatagagcatatcggggtaacgcgggtgccgggagccgagcgggcggtccatcacacagtgcaccggcctgccgagcacgttcgcgtaatccgcgcgcgttctgtgcagcgctgcattgcgcgcgtcctccgccttccgccatgcttcgcgcgcgatttccgcatcgccgagcaaaacgcgctgcgccgcggtattttcgaagatctcccgcaaagcggcctcggccgcttccgcgcgctccgccgcgttttcgccgaaatccgccgaaaggcgcacagcatccgcctccgctgcgcaggtgatcgcgccgtagtaatccttgtattttttatgcaccgccgtccagccgttttccgcgggctggagcagcagtttttccgttttcagcgctctgtaccgcatcatttcaaaatcagctccaccgggcagtggtcgctgcccgccacctcgctcaggatacggctgtcctccacgcgctccctgagctcgtcggtcacgaggaaataatcgatgcgccagccgacgttcttctcccgcgctctgcccatgtacgaccaccacgaatacgcgtcggtctgatccggatacagcatgcggaacgaatcgttgaagcccgccgcgagcagctcggaaaacttgccgcgctcttcgtaggagaacccggcattgccgatgttcgccttggcgtttttgaggtcgatcatcctgtgcgcgacgttcatatcgccgcagacgatgaccggctttttttcatgcagcttttcgaggtaggcgcggaacgcatcctcaaacgccatgcggaaatcgatgcgcacgagctcgcgctgggcgttcggcgtatagaccgtgacgaggtagaaatccgggtactccgcgcagatcacgcggccctcggcgtcgacctccgcaaggccgatcccgtacgaaaccgagagcggctccgtctttgtgaacacggccgtgcccgaatatcccttcttttcggcggagaaccagtattccgtatagcccggaaagtcgaaatccgcctgctccttctgcattttcgtctcctgcaggcagatgacgtccgggttctccgcctgcaaaaattcggcgaagcccttcgccatgcaggcccgcaggccgttgacattccaagaaaccagcttcaaagcaaaatcacttcccatttcagatgatctgtgttatactattggatacttcaaaatgaacgccgtccccaccgcagcgctgtttccatcgctgcacagcgcgggacgaatttagaaaggagtccacagacatgcagaatcctgttgttaccattgaaaccagccgcggcacaatcaaggccgagctgtaccccgaaatcgccccgaacacggtgaataatttcatctctttgattcagaagggcttttacgacggcacaattttccaccgcgtcatccccggctttatgattcagggcggcgacccggagggaaccggcatgggcggcccgggctacggcatcaagggcgagttcgcgatgaacggcttcgagaacaacctgcgccacacgaccggtgtgctctcgatggcgagaagccagcgcccgaacagcgcgggcagccagttcttcatcatggtcgatgacgcgccgcacctcgacggccagtacgccgctttcggcaaggtcatcgagggcatcgacgtcgcacaggcgatcgtcgcgagcccccgcgactggtcggaccgtccccgcgaggatcaggtcatggagaaggtcacagtcgagaccttcggcgtcaactacgacgagcccgtcaccggccccgagcgcggctaagcagcatcgtgccgctgcgaagtcgcggaagagaatgcgaagcattctgctgcgatacgaagtatcgcatgcgtccggcgagcctcgccggtgctggaaggcggcagagttaagggacggagtcccttattgcgcgtcgcagcgcgcgccccccttgcgtcacacaagcgtaggaacccctcgccgggggttcctacggcggcaacaccgccgcgaagttgtatacgtcaccgtacacccccgcccttgcgggggtgtttttatttgtccggcacgtcctctttatagacgaagtgctgcacgcccgcattgagccggccgagcagctcgccggcgttcgcgggatacacctcgatttcatgcagccggtcaaacggaacccagtgaaattcgaggtcgaatccccgtccctccagccgctccttcgcgataaagctaccttccttcggaatctccggcgtcaggatgtccacgagatagtaaaggcagatctgatgacagggcttatcgccccacggaaagaaaatctccgccacccatttcaaatcgcggacggcgatttgagcgccaatctcctcccggaactcgcggacaagggtctccgcgttggtttccccgagcgcgacatgcccgcctggaaaggcgtagcccgcgtcgtttgtcggcttttgcagcagcactctgccgttttgcatgcagatgcctgcgacgcggtagctgaacacaaattcgtctgttttaaaaagaatatccggcattggattctgcggcctcccttccctcagccttcctcttcctgctcgatccgtttcaaaataagcggcttcttctgcggcggctgcgcgccgaatgcaaaggcggcgtgcagcgctccttcaccctgcgcgcatctttccgcatcggctgcatagagcgttgcgagcggctcgcccgcctccacgcggtcgcccttattcttgtggagcatgatgcccgcgccgaaatcgatcgcgctgtcctttgtctctcgcccggcgccgagcagaacgctcgcgcggccgattttctcggcgtccgcctgcacgatccagccgctctgcgccgccttaaacactctctgcaccgggctcaggctaaaccgcggcgtatcgcgcaggtatacgctgtcgccgccctgcgcctcaaccatttcgcacagcttgcgaaatgccgcgccgctttcgaccgcggcctgcgccatctcccgcgctctttcgattgtcccggcccgctcgccgagatagatcatattcgctgagagctccatgcacattgcggtcagatccgccggcccgcggccgcagagcgtgtcgcagacctcgatgatctcgagcgcgttgccgacggcgcgcccaagcgggcggtccatatcggtgataagcgcgacagtccggcggccgacctgcgcgccgatctccaccatctcgcgggcgagcgcctcggcgtccgcctgcgttttcataaacgcgccgctgccggttttgacgtcgagcagaatgcggtcactgcccgccgcgagctttttgctcatgatcgacgaggcgatcagcgggatgctctcgaccgtgccggtcacgtcgcgcagcgcgtagagttttttatctgccgggcagaggttgccggactgcccgatgacggcgcagcccacgcggttcacgatggcgaggaattcctcccgcccgatcgcggtgcgcatgccggggatgctctccatcttgtcgacggtgccgcccgtgtgcccgagcccgcggccgctcatcttcgcgaccttcacgccgcacgccgccgcgatcggcacgatcacgaggctcgtcttatcgccgacgccgcccgtcgagtgcttgtcgaccgtcacgccgtccacgccggagaggtcgaccgtgtcgccggaatgcgccatcgcgcttgtcagccgcgccgtctcgcgcgccgtcatgccctgaaagcagaccgccatcatcagcgccgaaagctgatagtccgggatcgtgccgtccgcacacccgcgcacgaccgcatcgatctcgccgtccgtcagcgcgccgccgtcccgctttttgcggatgatgtccaccatatgcataaaaaccgcccctttctcagcgcaggtcgtcgggcgagaagctctcgggcagaagcgccgcgagtgtgtacagctccatgccgcccgcctttgcgagtatgattttaaaatcgtcggcgcagaattcgcgcatgacctgccggcacacgccgcacggtgcgcagaacgacgcgggaggtcccccggctttgccgcccgccacggcgattgcggtaaatttccgctcgcccgcggaaacggccttgaagaacgccgtacgctcggcgcagttcgagggcgtatacgcggcgttttcgatgttgccgccggtgtagatttccccgctttccgcgagcagcgccgcgccgaccgcaaagcccgaatacgggcagtacgcggtttcccgcgcctcgatggccagcgccgcgagccgccgcgcggtctccccgctccactcaatagccatgctgcgcctcatttttcaggatcttcacgaggcgggaggtgccgagcctgtccgcgccgagcgccaaaaagcgctccgcgtccgcaaacgacgaaatgccgcccgccgccttgattttcagtgtgtccggcgaggcctcgcgcatcagcgccacatcctcgaacgtcgcgccgcccgcctgaaagcccgtcgaggtcttgatgtagtcggcgcccgcagcggcaacgaccgcgcacaggcggcgcttttcgccgtcggcgagcagacatgtctcgacgatgaccttgagcgctttttcgccgcacgcgtccttcaccgcgcggatctccgcctcgaccgccgcatacgcgccggccttcaccgcgccgaccgggatcaccatatcgatctcgtccgcgccgttttcgacggcgtccttcgtttcaaacaccttcgccgccgtcgtattgtacccgttcgggaacccgatgacggtgcagatcttcacgcgccccgccgcatgtgccgcggccgcctgcacaaagcgcggcggaatgcagacgctcgccgtttcaaaccggatgccgtcgtcgacgacatcgcggatctcgtcccacgtcgccgccacgccgagcagcgtgtggtcgacatggctgaggatttccttttctgtcatggcttcaccgtttcctttcggtctgtatttcactgcactgtaaacgctgtccattcaatatggttgtactgcatgacgtcctctgcctttttcatgccgagcttctcatagaacggaactgcattttcattggcgatcagatataccgcaatgtccttttcgccgcccgccttgtcgtgtgccgctttcatgagccgtctcccgatgccccgccgttcgtagtctctcgccacgcccagatccgtcacataaagccaatacgcatagtctgtcagtccaaacagagcgccgaccattcttccggcttcatttcttgcagtgagactgatcgaagcatgattcacaagccttgtgattctttcttcaaatctctccttgggatattgcaatcccagatccgtccttttcagaaaatcgatgtattcctccggggatacccgttcctcttcgattttgatttcttcctgcataaaaccgcctcctccagtgtcagtacctctctgcgcacagctgcgttggccacgctccgaggcggcgcatccgcctcccattcagccagtacagcacatggattttcaacaggacaaaaaaatccggtgaaaaattccgccgcccgcgctcacgccagccgcagcgcgatctccatcatctgcgtgaacgtcgtctggcgctcctcggccgtcgtaccctcgccggtcagcggcaggtcggaaacggtcgccatagcgagcgcctttttgccgcagcgcgccgcgttcatgtagagcgccgccgcttccatttcaaccgcgagcacgcccatcttcttccagtccttaaggctgtccgcgtagtcgccgtagaacaggtcgctcgagagcaggttgccgacgcggtgcgggacgttccgctcgcgcgcgagggaaaccgctctttcaagcaggccgaaatccgccgtcggcgcgaaggtgccgggcaggcggtactgcgcggcgtagttggaatcagtgcaggcgcccatgccgatcacgacgtcgcgcagcttcacgccgtccgcgatgccgcccgccgagccgatgcggatgatcgcctcaacgccgtaaaagttatacagctcatagctgtatatgccgatggacggcatgcccatgccgctgcccatcaccgagacgggccgcccctcgaacgtgccggtatagccgagcattccccgcacggtgttgaagcacaccgggttttcgaggtacgtctccgcaatgaatttcgcgcggagcgggtcgccgggcatcagaacggttttcgcgatgtcacccttttttgcgttgttgtgcggtgtcatggtttaaagtcccctttcaaaaaattactctctgtgctcgacaacgaccgtcagcatgacgagatcgtcgccgccggtattttcgatgctgtgcgccgaccccttcttgcagatgtgacagatgccggggaatagagcttcctcctccccgtcacaaaccgccctgccggttccggaaagaatgtagttgatgtcgtcgcttgtcgggtgcgcatgcaggccgatcgagccgccggcatgtatgcggcaaggaatgatctttccgtccgggtccgcatacatttgggccgacatctcccccgcgccgccgttcataccgggcacgcgcatcgcttctatcgcattaaaatcaatccgcatatttgttcctcccaatcgcttcagctttgcagcagcccttcgaggtctccgacggagacatccatcctaccgcctccatcgtcatgccagaggcgaggaaccggccgaccaccgctttcatttccttaccgacctcgacgaagtacccgtcgtaaccgcagagccggacgacgcgccgaaatcaagttcgtaacgcgtgccgtgcgaaaacagcacgccgtccgtcaaacggatgcgcaggatgcgggtgttctcatcgctgaaatcgttgtgcccgttgtcgatccacgcggcgaacgccgtgcgcagccttgcggcgagctcggcattctccgccctgccgaaatagccgaggtcctcgccccggccgtgcgccgtgaaccactcgccggccagcgccgcctccgggttctcccgaagctgccgcattttgttggaaaggccgtgggtgatcgcgtaaaacgcgccgttttcataataggcgttcacatagcgcacctgcggtctgccgttttctactgttgcaagcgcgaggatattgtcccttccgaagcgctcccgcaagagcgcctccgcctcccggctccaccccgccattgtttttcctcccttttgccgtttttcctacagaaacttccagcccgctgtctccgcatcccagcagacctcgccgaacccgtcgtcgagaaatacgcggagcatcgcgtcgaagctctctgcgagtctgcacgtcttgagcgacgcgagcggcgcccagcgcgcctcgccctccgcggaggagcgcacggcgccgaaaaagcggtccgccttatagagcagcacgacatagcgcgtgccgtcttcgagcgggaactgcttcacgccgcacaggcgcgggttttccaccgtgacgcccgtttcctcatagacctcgcggatcaccgcggccgtgaacggctcgcccggctccacatgcccgccgggaaagacgattcccggccagtttttatcggcgcggtcctgcacgaggacgttccccgcgccgtctgtgaccatgcacatattcgtgagtactgttttttcgatgcccgccatatcctcattcccctgtccggccatgccgaaaaattttcccaaaagtcagagcgcaaagcgctccattccatcgcaaagaagccgctccaccgcgcggccgatgcggtcgaagccgcagagcgtgcccagattgcccggcgcaacgcccgcgccgagcgctaaaaacggaatgtactcgcgcgagtggtcggtcgagggcgtaccggggtcacagccgtggtcggccgtgatcatcagcacgtcgtcgggagcaagcgcgccgatgatctccggcaggcgcatgtcgaaatacgagagcgccgccgcgtagccgtccacatcgttgcggtggccgtagagcatgtcaaaatcgacgaggttcacgaagcacaggcccgtgaagtcctccgccatcgcgcgcagcagcgcgtcgacgccgtcggcgttgttttttgtgcgcacggccttcgtgatgccgcgcccgtcaaaaatatcggcgatcttgccgatcgaatataccgttttcccggcggccttcagccggtcgagcaccgtttcgccgggcggcggcagcgcgtagtcgtgccggtttgccgtgcgcgtgaagcgccccggcgcgcccgtgaacggccttgcgatcacgcggccgaccgcgagcccgcccgtgagcatcgcccgcgccgccgcgcagatctcatagagctcggagagcggcacgacgtcctcatgcgccgcgatctggaacacgctgtccgccgaggtatatacgatcagcttccccgttttcatgtgctcttcgccgtagtccgcgatcaccgccgtgcccgaatacgggcggttgcacagcacgccgcggcccacggccgccgaaaagcgctcgaggaacgcggccgggaagccctgcgggaacgtgggcagcggctgctcgctgacgacgcccgcaatctcccagtggccgaccgtcgtatccttgccgttcgatttctccgagagccgcgcaaatgcggcggacggcgtgtccgtcctttttccgcacgccacgccgtctatgttgaaaagcccgagcgcgccgaggtttggcagcgcaaagcgcgggcttttcgaacagctcaaaagcgtgttgctgcccgcgtcgccgaagcgcgccgcgtccggcatctccccgatgccgacgctgtcgagtacaattaaatatacgcgttttgcccgcatgatgcttctccttatcctgttttaaacgatgccggcccgcaccgccgcgtccaaatcttcgcgcgtcggcaggccctcgttgtcgccccggtgcgtgatctggatcgagccgatcaccgtgccgcggcgcgccgcctcgctgagcgaaagcccctcggccaccgccgagagcacgccggccgcaaagccgtcgcccgcgccgaccgtgtcgacaatccttttgaccgggaacgccggcaccgtgccgctctcaccgcccgtagaccagtacgcgccgtccgcaccgagcttcacgatcacgctgtctacgccgcggtcatggtagaacgcggcgatttccgcggccgtctctttctttgtgaggatctttccctcatggatgccgggcagcacgaggtctgcctcggcggcgagcgcattcagcgtgcgcaccatctccttttcgtccccccagagctgcgggcgcagattcgggtcgaacgatacgaacatatcgagcgccttggcgcgcgccatcagccgctttacggcctcgagcgccgatttcgacaccgccgggaaaatgccggtcacgtgcagaaagtcgcagccgaacaggtctagcttgtcgatgtcgtgcgtcgagatctgcgaggccgcgctgccgcggcggaaatacgcgatcttcgggtcgccgaccgcggtgctgcccttcatcatgaagccggtcggggctgtatccgtcaccgtcacgaggtcggccgcgacgccgtttgccgccatgctcttcaaaatgcggcggccgatcgggtcgtcgccgaggcgcgtgcagtagagcgccgtgtggccgagccgcgaaaggccgaccgccacgttgtactccgcgccggcgaccgccgccgtgaagtgctcgacgtcctccagctcgccgggcgcctccgccataaagagacccatcggctcgccgacgagcacgattttgccgcgctcgcccgccggcgtttcctccgccgcaagcgccgcttcatccacaaaatccattttcatcgcttcgtcctttccgcgcggcggcccaaaaccccgcgcgctccaccggattaaaccgtcgtttttacgatcgtgcatttgccgctgaccgtcaccttgcccgcgccggccgggacgaacaggctgtccgccgccttgaagccgactgcgttttccgcgcccgtcaccgtgcccgcaccctcggtcacgacgagcgaggcgaaagagctgccgtccacgtcgatctccaccgcgccgtcgatctcgtacttttcggtcgtgaagtattcgcaggaggcgagcgccgtttttacgccgcccgggatcttttcgggcgcgctctgcttgtcggccgtgtcgctcggcgtcagcgtcgaaacgtcgatcgccttgtcgatgtgcagctcgcgcagcttgccgtccgcgccgcggcggccgtaatcgtacacgcggtacgtcgtgttcgaattctgctggatctcgcagatcaggatgcccgcgccgatcgcgtggatcgtgccggactggatgaagaacacgtcgccctttttcacgtcggccttatagagcacgtcggtcagcgtgttctcttcgatgcgctttctgaactcgtccttcgtgatcgcgcggtttacaccgaagtagagcgaggcgccggggtcgcagtccacgacgtaccacatctcggtcttgccgtattcgccctccacacgcagcgcatattcgtcgctcgggtgcacctgcacggaaagcgggtccttcgcgtcgatgaacttgatgagcaccgggaattccttgaatcgcgcgcagttcgtgccaagtacgccgcggccggccttttcgatgtaatcgccgaaggtgaggccatcgaactcgccgcccgaaaggacactctggcccgccgggtgggtcgaaagctcccagctttcagcaaccttctcgtaatcgcagtttttgccgtacacatcgcgcagcttcgtaccgccccagaggtaatccttgaatgccggtgtcagtttttcgattttcatgttgcttgctcctttgcaatgtagtctttatcgagatctatttaaaaaacactttattctgcttggatttccgccgccatatatttcctatgcagtcattcgccgcccttttggaaatccccgcttgaggctcggggttatttctttcttgcccaaaggatcagtctgttcgtcctctcgcttacgggattccactcgtaatcgccgtataccgcttcgagagcgaaaccggcggcctccagccagccgcggatctgcccgaatgtcgcaaagtggcggacacatggcagctcctgcctgatttttgtgccgtcggcaagggtcaactcaaagcatcgcctgaagcggacgagctgtgttttactgtcgaacgtgctcgagtgcagggccattttccccgtattgcctctgctgtccgtcccctgccagatcaccgtctctccgggtgtgtcaaaccaattctcgggatgaagggtgtagccgtaatcgatgtaaaggtgcccgccgggaacaagcgcatcagccgctttgcgtatgacgcatgcctgcgctcggccgtaatccatgtcggtgacaatgttaaacagaaaattggctgccagcaggacgacctcgtagcctgtaccccaatcgtccctgataacatcggagcgccgccagcggatattctgcaggccggccgccttcggcgaaatcttatccagcatatccgcgtctatatccagacccgcggcatcatgccccgcctttgccagcggcacaaggatgcgcccgcttccgcacgcgacttccagaatccttttcggtgcatcgccaacgatcgacagcgcaaagtccacatcggccgtatctgtttcgttcgcatcatacatgtcagcggcccatttcgcaatgattttttcttcgttaaacaaaattcttcctcctgatggattggagggctcagattccattcaccctccggtttcgtgtgaatgctttccatactgtgcttttcatgtttttcattcctttcggtaaaatctattacagcgccaaagcattataatcctgaaacactttgcggccaaatgccccgctcaccgcgcggtcgattgcttttcaaagagcggcatatcgagtacgagcgggtattccggctcggtgccgcgcagcatgttgatgagcttgttcgccgcgatgcgccccatctcgtccttcgggtgcgcgaacgaggtaatcttcaccggcgaatactcggaaatgctcgagttgtcaaagccgacgacgagcacatcctcgggcacgcgcacgccgcggctcgtcaagaggtcgatcacgccgtaggcgatctggtcgttgtagcagacgatgccgtcacagccgcgcagccgctcgaacatgtaatcgcggttgtccgggcggaagagccggctgcgctccgccgtggtgtaccacacgacgcagtcgtcgccgatcgagcagccgttgcggatcagcccctccgaaaagcccgcgtagcgcccgtggccctgcgtgtcgtccgatttaaacacaccgccgagcctgcggcagcccttcgtgagcagcagctccacggcctgccgcccggcctttttgtcgtcggtcacgacgtagacggcattcgggaggtcgcggtaatagctgttgaaaaagacgaccggcacgcccatcttttcaagcttgcggtaaagctccacattcgggttcggaaacgccgttttcgtgccctccacgatcacgccgtcgatctttcggctgatcagcgactgtaaaatacggccctcgtcctcgacgtggttgttcgtcacgccgagcgtcaggctgtagcccgcgccggtcagcgtctcctcaatgccgcggatgatcgtcgggaagatatagtctgagatatacgtcgtaacgatggccacattgctgccgcgcggcggcctgcggctttcgctgctgatgtatgtgccgctgccgcggcggcgctcgatcagcccctcgcgctctaaaacggagagcgcctgccgcacggtctggcggctgtagccgaattcctccgaaagccggttctccgattccatccgctcgcccggcgcgtatgcgccgcccctgattttttccttgatggtctccaccagaaaacggtacttcgccgtttttctttccgtgtccgccatgcctctactccctttccccgcgccctgcgcctgcggcggcgcgcggtcgtgccgaagcgtgcggttctccgccccggctgccgatttgtctatacaactctattataaaaaaccgtacaaccttttgcaagcgaaaaaacgcattttcacaaaaaattgtacggtccggttctctttctattttgacaaaaaattcaggaattttaacccgcttctgcgatgagcagcgccgtcatctcctcgacggtgccctcgccgacctgcacgaccgcttccccctcgagccgcagcacatagctgtacgtccgtgccgcgccgccttcgctgtagtcgatcaagatctgatacagatccgggtcgccgccgcttttcgcctgcgtcgtgctcgtgatcgtataatcgctggcgccctgcgcctccatgcgcgccgcaaagcacgcttcggcatacgcctcggcgatcttcgatctctccagcgggcttttgaccgcctctgcgcaggccgcaaggccgcagagcaggagcgccgccagcaggcaggccgaaagttttcgtttcacaccgtccgcctcctttatcgccgcaaattcaaaatcgaacaggccgcaccatacggcgggcgcacggtgcggcgaaatcattcggttattccacggtgagatcgaagcggaacgcgagcttttcctcgtcgaggcgcatggcctttgtgagctgcgggccgcagctgttcgagccgacgccgctcatcttgtaatcgaagcagaacaccatgtccgggctctccgtgagctcgtagttgtgcttctttccggcaagctcctcctgcgtgtaggcggaaaggttaaacgagaaatcggcggggctcgtcacggtcaccgcgcctgcgccgtccgtaacggtgacggacttgcagccgaagcggcttccgttctcctgcggcttcacgtagtcctcaaaaagatcgtcggcgcgctgtgcgaagcggccgaggtacgaggcctgatgcttgtcgcagtaggattcatacggcccgtagccgaaatactccgccgtgctgaacgccttcggcaggaacatccgaaggccgaagcgcggcaggaaaaccagctccgtgtcgcgcgtgccgtcgatttctgcacggatgcggcctgtgccgtcgatctcaaaccggcactcgagcctgaggaacggccggcggtacacggccgcgaggcccagcgcgcaggtgatcgccgccacgccgttttccacggtgcagccgcagtcgtacaccttgacgctcgggcagtcgtagccgattttcttccagtccgtatcgacatactggtcgttgtcggtcggcgcgcggtaggtgttccatgtcatcgggcgcgtcatcacggaggcgttgctcttgacgaggctctcaaatacgccggtcgttttcgagaacacatagcggaaatccgggccgctgaccgtgatgcgccgcccgtcctccacggcctgcacgccgcccggcacgagcgccgcctcgccgcgcgccgcgcgggacacgatgagctggtcgaagccgagcgcatggccccgcgggaaaaagacgctgtcgtcctttttcgcgctgtagttcagaaggatcgtcacgtcgcccgtctcgggcacctcgccgttcaggcggatcacgccgctctcgtgcgggggaatcgcgatgtcgtcgagcacgccgcaggccgtcgtctcgccgtcctgctggatttcccacgagatcatcaggaattcgtcggtgttcgtgaaatcgcggtaatttgtcaggcggatctccgcggtcttcgcgtcggtcagctcggcgcgcaccgggcggatcacgttcttaaattccagaaggcccgtgtgcggcgtgcggtccgggtagacgaggccgtccatgcagaagttgccgtcgtgcgggaactcgccgaaatcgccgccgtagcggaagatgtcgcggttgtcgggcgtcgtgccgccgtacaccgcgtggtcgcaccactcccagacgaaaccgcccatgaagccgtcgtgcttcatgataagctgctgatactgctcggcgtcgccggggccgttgcccatcgcgtggatatactcgcacagcacgagcggctgcgtgttcttcgggtccgcaaagtattcctcgatccactcgggcgccgggtacatgcggctgaccgtatcgagcgaggagaggtcgtttttgtggccgcgcgcgtcgtaatacgtgttctcgtagtgcgtcaggcggcccgggtcgtacgatttcacccacgcgccggccttttcaaacgacgggccccagccgctttcgttgccgtaggaccacatcagcacgcaggcgttgttcttgtcgcggatcacgctgcgctggatgcggtcgaggatcgccttatcgaaaatcgggttcagcgcgacgtcggcatattcgtccatgccgtgcgcgccggtctgcattgaggcgccgtggctctcgatgtccgcctcggcgatcacatagaagccgtattcgctgcaaagctgcaaaaaccacggggcgttcgggtagtggctcgtgcgcacggcgttgatgttgtgctgcttcatcaggatgaggtcgcgcttcgcctgctcgcggctgatcgtgtagccggtcacggggtcgctgtcgtggcggttcacgccgcgcagcttgatcttcacgccgttgaagtacagaacgcccgcgcggatctcgatcttcgaaacgccgatcttctgctcgatcacctcgtccggcgccgtgatgcgcagcgtgtactggtacgggtcctccgcgttccagagcagcgggcgctccaccgtgaacaccgggttctcgccggaaacgatctgcaccagctcgccgcccggcgcgtacagcgccgacgtaagctccggcctgccgcacagctcggtttccacgcggatcacagcctttgaaaaatcgccgttcagctccgtttttacaaaaaagtcgcggacgtggctttccgggcggctgatgaggtacacgccgcggaaaatgccgctcatgcgcagcttgtcctgatcctcgagatacgtgccgtcgcaccacttgagcacgagcaccgccacggtgttctcgccttcgataagcaggtcggtcacgtcgaattcgctcgtcgagtgcgaaacctggctgtagcccgcaaactgctcgttcacccacaggtagaagcaggaatccacgccctcaaaattcaggtaggtgcgcagctttttgtcctcggcactcacctcaaagcggcgcaggtacaggccgcaggggttctcgtccggcacaaagggcgggtcaaacggaatcgggtagcggatgttcgtgtacatgtggcggtcgtagccggcgttctgccagcaggagggcacctcgatctcgtccatgtcgtcctcgtcaaagcagatgtccgcctccatgccgtcgggaaaaacatcgaggaacgagtcgaaatagcggaacgaccacgtgccgttcagcgagcagacgcgcgaggattccgcctcgtcgccgggcgccttgggcaggtagtagctgcggggcgggcaggtgccgacgtgcagcaccgccgggttttcgtgcattttcttaaattccattgcaatacacactccgttctgaaatttacggctgatctattttcaccgccgcggcacggtccttgccggctgcggaggagcctctcttctgcggcgcggcgcgcagggcgcagcgctctgcccctaaaattttgagttgaaccgctttcgtccgtatgctatactgaacccatgcagtctcaacacaagcttaccgtatatttggtgcccggtcaagtcaaatttgcaaataaaatggaaaggatattccgcctatgaccatacagattctgctttccgccgcattcctcgccgccgtgctgtggctcggcttccgcgtgcccgcggccgagggcggcgcgccgcagcgccggccgcttttcggccttccggccgcgcccgttttctgcaccgttctcgcggcggcgctcgtgctgcggctgattctcggctacagcatcaacggcttcgacgccgacatcgcctgctttaaagcgtggggctactacacccacgaggtcggcttctccggcatgtattacagcgatttctttctcgactacccgccgggctatctctatctcctgtatctgaccgagtttttccgccggctgttctttattccggactacgcgcagggtgcgacgctgctcgtaaaaattgtgccgatcctctccgacatcggcacggcggcgatcgtctgggcgttcgcgcgcaaaaagctcggcgaaaacggggcgctgttcgtctcggccgcctacctgttctgcccagccgtcatcatcaactcggccgtgtgggggcaggccgacagcttctgcgcgctcctgctgctctggacggcgctgctgctctggcggaaccacacgcccgccgcggcgctcgtttacggcctcggcgtgctctcgaagccgcagatgctgattttcgcgccgatgctgatcttctgggtcatccgccggcgcgactggaaaaacctgattctcgggccggtcatcgcgctcgcggcgatcctcgtgctctccgcgcccttcatccgcgactgggactttacgaagctcatcgacctgtataccggcacgatggactattacgcctactacacgatcaacgcctacaacatctgggcgctgttcgggctcaactgggcggcgctgcctgaaagcagcgtgtggctccagttcggcgtgccgctcgccgtgctgctttccggcattctgatgctgaaagcgaagcggaaggaggcgctgttcgcctgccccgccgtcctgatgttcacggtgtacatcttctgcgtcaagatgcacgagcgctacctctaccccgtgcttctcagcctgcttctgacctatgttttcacgaaggacaggcgcttcctcgtcagcttcgcgggcacttcgttcttccattttctgaacgtcgcctatgtgctctacctcaacaacgcctacattgagccgaccgcgccgcagatcctcctgctctcgctcgcgcacatcctgatgtacggctacacgctctacgccgtgtggcgtgttttcctcgcgaaaaaggccccggcgccccttaacctgccgcggcgggaaaagcccgtttcaggcggaaaagccgcgccgtccggcgcaccggactccccgctgctcaccgcagagggccgcagcgtgcgtttcacgcgcaccgatgttttcctcgtgtgcgcggtcacgctggcttacgggctcgtggccttctggaacctcggcgaccgccagaccgcgaacacgacgtggacgcccgaaaacggcgagagcgtgatcttctccaccgaggacgcctacagcgaaatctacttcctgccgggcatcgcccccgccgacgacggcgtcggccagcgcgtcggcgtctcgatgctcgtcgaggtctccgacgacggcgagacctggaccaccgcgctcgacaacacggagggcagcgtctacgcgtggaagagcgctgcggcgctcgcaaccggcaagtacatccgcatcacgccgacctgcgacgacctcgcgatcaatgagttcgcgctcaaaaaggcggacggcaccggcttcgcgacgctgacggcggtgcgcggcgaggcctccgcgctgaccgacgagcagaatgtcgtgccgctcttcccgagctatatgaactcgacgtatttcgacgagatctaccacgcccgcacggcctacgagcacatcctcgggctagagccgtacgagaacacgcacccgacgctcggcaagctgatcatctcggccggcatccgcctgttcggcatgaacccgttcggctggcgctttacgggcacgctgttcggcgttttgatgctgccgatcctctaccaccttttaaagcggctgttcggctccacgttcctctgcacggccggcacggtgctcttcgccttcgacttcatgcactacgtgcagacgcgcatcgcgacgatcgacacctacgccgtgttcttcatcttgctgatgtacgacgcgatactcgttttcctgcaaaccgacctcatggccgacggctggaaaaagattctgccgccgctctttttaagcggcctgttcatgggcctcggcgtcgcctcgaaatggaccgttgcctacggtgcggtcgggctcgcggtgctcttcttcggcaagctcgttttcacctaccgcgcgctcgggctttcgtcgctctccgccagaaagcgcgacgaaacacaggccgccttctggcagagggcgctcaaaacctgcctgtggtgctgcctgttcttcattttgatcccgttctccgtgtacttcgcggcgtttctgccgctgacgcttctgccgcacaaccgctacgacgtgctcgggcgctttttcgcctaccagacgcacatgtacaattaccactcgaccttgcaggcgacgcacacatttgagtcgccttggtaccagtggccgttcgacgtgcggaacgtctggtactacggcaactacaacgccgacggcgctggcggcctgcgcacgatctcggtgctcggcagcccgctgttctggtgggcgggcgtgccggcgatggtgtacgcctttgtcagcaccgtgaaaaagcgcgccctgcccgcggttatcgccgcggtcggcttcctcgcggtctacctgccgtgggtgctcgtgccgcgctgcacgttcgtctaccactacttcaccgccgtgccgttccttttgatcgcgctgctttcggcttacagccgcctctgcggctcgccccgcctgcaaaatccgattttctcgcgcacggtgcgcggccatgtggtcgcgctgacggccgggcagagcgcgatgctcgcgttcctcgctctgcacctgatcctcttcgcggtcttttacccggtcctcaccggcacgctcacgacgcaggattacgcgaacgcgctcgaatggcttccgacctggttctttgcctgagcgcggtgccgtaatcgaagccaaacggccccgccgcaaaaattcctctgaaaaaacggacgatccgcaaaacgccccttgccgcagctatccttctgcagcaaggggcgtttccgcaatgttcttttttatcggggcagcttatcgccgccgggttccgcacaggggcggccgtaagccatcaggggaaggccgggcgcagcgcccagcgcgtgggtgttgtagagcacaaccccgtcgaacggcgcatagagcgcctgcacggcggcgccagtctcatcctccaccgtcccgagcagctcgcctgcccggaagggctcgcccgccgttttgcggcagtaccagaacccccgctccgccgccgtctcgtagtgcgcgtcgcagatctccagcggcgccgccgcattcggcgtgccggcgcagataccgagaaaggccgcgccgcggcggctgtcaagggcatgcggcacggagtcggcacgcaaaacagggggcctgtccgcacggacaggccccctgttttgccggtaatttttacagcaccgattccagacgctcgctctccggcgcccgcgtatcgaggtgcttgatctccttgttgtacaggtgtacgaagaacaccaccgtgatgatgagcgacgcggtctccgaaatcgggaacgcgaaccacacggcgtcgaggctgatcttggaaagcagccaggccgctggcaccagcaccacgagctggcgcagcagcgactgcacaaggctgtaaacgcccttgccggtcgcttggaacaaggtggaaagcgtgatgccgaccgccgcgatcgggaaatggatcgcgatgatgcgcagcgccgggtcgccgattttcagcagctcgtccgtcgcgttgaagatcgaaatcagctcgccggggaacagctcgaaaatgatcgtgccgaccacgttgataatcagcgcgatgatgacgcccgtcttgatcgcgcccgtgacgcgctgcttgttgcgcgcgccgtagttgtagcccatgatcggcatcagcccctgcgtgaggccgaaaaccggcatgaacacgaacgactgcaatttaaaatacacgccgaatacgttgacggccgccgcggaaaacgccgcgagaatgccgttcatcgccatcgtcatcacggtgccgatcgcgttcatcacgatgctaggcacaccgacgacgtagatgtcgcgcaccgtcttgccgtggaagcggaagccccgcaggctgaacgaaaccgcatgcttgccgaaggcgaggatcaaaaggccgaccaccatcgaaaggatctgccccgccaccgtcgcggccgccgcgcccgcgacgcccatcgccgggaagccgaaaaggccgtagatcatgatgggatcgaggatgatgttcgtcaccgcgccgacgagctggatgatcatcggcataatcatgctgccggtcgcctgcagcattttttccacacagcaggcgacgaaaaagccgaaggaggcgacggtcacaatcgtcaggtaggtttcgcccatcgcgataacctccgcatcctgcgtgtaaagcgcgatgaagggctgcgccgtcagcgcgccggccaccgcgaaaaacacccacgtgatcaccgcaaggatgacgccgtgcgtcgcggcgctgtccgcggcctgctggtgccgctcgccgaggcggcgggaaatcagcgagcctacgccgacgccggtgcccacgccgaaggccgtgagcaggttttgaatcggaaacgccagcgaaacggcggtcagcgcgttctggctgatctgggccacgaagtagctgtccacaatgttgtagagcgcctgaatcagcatggaaaacatggcgggcaccgccatcgtaaggatcagcggcagcatttttgccgtgcccatgcggttctgcgccgaggcatctttctgggttgacatggtattcccctttccttctctcacagagaaacggctccgccctccctccgggcgaagtcctcaaaaaattaaacgattatctattttattataccacatctgcaccggcctgacaatccgtgcctcagggtgtctttttgtaaaaagtatcctgtagtttttatggatttcccacaaaccccgcgcttattctgcgctgtgtccgccgccggagccgtcacagaatattcaccttttgttcttgctttcgacgcaataaaaagctacaatatgtacagactcccgttttgtatgcttttgaaggaaagcggcggcaaaaaagcaggcaatcggcccggccgcacacgaaaaatttgaaaattaaggaaagcagggacagcatatggcatccggaaaaattctcattgtagacgacgacagaaatatctgcgagcttctgcggctctatatcgaaaaggaaggctttgaaaccgccatcgcaaatgacggcaaggccgccgtgcagatgtttgacgcggtgaaccccgacctcattctgctcgacatcatgctgcccgagctcgacggctggcaggtttgccgcgagatccgcaagaaatcgcagtgccccatcatcatgctcaccgcaaagggcgaggtgttcgacaaggtgctcgggctcgagctcggcgcggacgactacgtggtcaagccctttgaggcgaaggaggtcatcgcgcgcatcaacgcggtgctccgccgcatcggcaaaaaggaaacggctcagacgcaggaggtcagctacgagaacctcacgatcaacctgacgaactacgagctcaaggtcaagggcgtgcaggttgatacgccgcccaaggagatggagctgatttaccacctcgcctcgaacccgaaccgcgtctttacgcgcgaccagctgctcgacgaggtgtggggcttcgactattacggcgattcccgcaccgtcgacgtgcacgtcaagcgcctgcgcgagaagctcgagggcgtttccgacaagtgggcgctcaaaacggtttggggcgtcggctacaagtttgaggtcaaggactgaaaggaagaggccccgtgcagaaatccctctttggcaaataccttcggaacacgatgatcatcgtcttttcgagttttgtcgtgctcggcagcgtgatgatggtcgccttttccgaatacacgaaaaacgacaagcgcaaaatactgacacagagcgcaacctccatggccagcatcacagcctcaatggtcgccgaggaggataacggcagcgccgtttcctcatttctcctcctctttgtcaaatccttctctttgaatatcgacgccgatatcttcgtcaccgatcttgacggcaacgtgatcctcggcgcgttcgccaacagcaccgaccgcgtcggcaagcagttcgtcccattcaaatccgttccaaaggaggctgtggaacgcgccgcggccggcacctttaccgggaacggcaagcgcaacggtatctacgaggacccgtattacgtggtcggcgtgccgctcgcgacctctgcggaggacaagacgccgtccggcgcggtgttcgccgcgatgaataccgcctcgctcaccgaataccagttcgcaacctttcagatgttcctgatcgcggcggccgcggcgttcctcctctcgttctgcatcgtcggcctgttcgcctaccggctcgtcaagcccctgcggcagatatccgccgcggccagaagccttggcgagggcgatttctcggtgcgcgtcccggtcgcctcgagcgacgagatcggccagctcgcgctttccttcaacaccatggccgattcgctctcgaacagcgaaagcatgagccgcagcttcgtggccaacgtctcccacgagctgaaaacgccgatgacgacgatcgccggctttatcgacggtattctggacgggacaatcccgcccgagcggcagagccactacctgcgcatcgtctccgacgaggtcaagcggctttcgcggctcgtgaaaaccatgctcaacctctcccgcattgacaacggcgagctgaagctgcgcccggccgatttcgatatctccgaaacggtgctttccaccgtgctcacctttgagaagagtatcgatgaaaagcagatcgacgtccgcgggctcgacgcgctggcccccaagcaggtgcacggcgacgaggacctgctccatcaggtcgtgtacaacctcgtggaaaacgccgtcaagttcacaaaccccggcggctacatcaagttcacggtctgcgacagcatcgaccgcgtcgccgtcgatattgaaaacagcggcagcggcattcaggccgacgagcttccgctggttttcgagaaattctacaagaccgataaatcgagaagtcaggataaaaacggcatgggcctcggcctgtacctcgtcaaaacgattatccggctgcacggcggcgatatttccgtcacctcggccgtagatcagttcacgcggttttcgttctacatcccgaagccggccgaggtaccgaagctcaagcccgcctacagcagcgccccggtggaggatgccgtgatctctgagcgcccgaaaaaggagcgccacggcaaggacgacgccaaatcaaaccataaggacggtcagaaccatgagtgaattcgataaggaaaaagaaaaccgcggcgaaatagcgcagtcgccggcttcgcccccggatacagcacagccttctccgatcccgaacgcggataccagcacacagcccgcgccgatcccgaacgcggacgccagcacacagcccgcgccgatcccgaacgcggacgccagcgcgcagcccgcgccgatcccgaacgcggacgccagcgcacagcccgcgccgatcccgaatgcggacaccagcgcgcagcccgctccgacagtccggatgccctacccgtatgcggcgcagcccgcccaccacgcggaaagcaccggaaacacggcggatttcggcgcaggcgcgcaggcgccgggcactccgccccccgtttttcacgcggaaagcggcgcgcccatccccggcggaatccccgcgggcggcgcggcgccgtttcagccgtacccctacggcgtcccgatgccgaacccctacaccgtgccggcacccaacccgccgcaggcgcagaagcgccggatgccgaccgggctgcgggtgctgctcatcgtgatgtccgtcctgctcgccggttccgtcatcggcttcgcctccttcggcgtctatacggcgctcaccacgtcccggccctccgccttttccgacttcagtcagccgtcgcccgccgaccccggcgaggaaaacgccgagcccgaggtcagcgcgcccgcgctgccggatatcgaggtcgtgccgaataccgagggcatcgcgctgaacagcacgcccaccggcgcaccgatgtcggcagccgaggtctacaataaggtgctgccctccacagtgcttgtcgtcacaaccacggagaacagcgtcggcaccggcaccggtatcttcgcgacggaggacggctatatcatcacgaacagccatgtcgtcctaaattcgaagtccgtcgccgtacaggtcaagacaaatgacggcgccttccacgacgcggtcgtcgtcggctacgataagacgaccgacctcgcggttctgaaaatcgagggcagcggctacacgcccgccgagtttggcaattccgacgagctcgtcatggggcaggaggtgctcgccatcggcaacccgggcggcgagcagttctccggctctctcacgggcggcatcgtctccggcctgaaccgctccgtcggcgaatacagctccaacggcatgacgtacatccagaccgatgcggcgatcaaccccggcaactccggcggcccgctcgtcaacatgtacgggcaggtcatcggcatcaactcggcgaagatcgtttccgagcagtacgagggcatgggcttcgcgattccgacgagcggcggcaaggccatcatcgacgacctgctctccggcggctacgtgcaggggcgcgtgcgcttcggcatcaagggcaacgagatcaccgaaatgcaggcctcgatgtacagcgtgcagaccggctttatgattcaggagatcgacgcggacagcagcttcaacggcaccgacgtgcaggtgtacgacatcatcaccgcggtggacggcgtggaaacgccgacgctcgacgcgctttccgacgccctgctcgcctacgggccgggcgacacggtcaccgtctccctgttccgcccgaatgaaaacggcgtgggcggcgaggccttcgaggccaccgtcacgctcctcgaggacaagggagaaacgcagtcctgaccggcattttgaagatacagccgtatcccggtccgttttcggtataataataagcaaagggcggaagcgctgtgcgctcccgccctctttgcgccgtccgcacgacggcgcttttctttttctgtccgggcttcaccggaacgcgacaatcacatacgtcacgccgctttcattcagcgccgccgcactgccgcccgcctgcggtgcagcctcctgcaagacggtgggctgcgtgccggagaccgaaagcccccggctgccctgcccgtccgcccagtaggccgcgtacagcttcgtatacgcgcccgtgtactccgccgcgcccttatccgccgcaaagacgagcaccgcacgcgggctgaagctcaaaaggtgccgccggctctccgcgccggtccccgtgtacgtgcgcacagacacgggctcgtccagcctctggcggcgcgccgcatcgagatgcgcatcgccgtcgccgaggtgcccgcccaccagcgtttcgagcgccgtgttgtcgctcacaaaatccgagcggcgcggcttatccgtccccgcccagagcgaaagccccagcaccgccgttttttcacttgccgccatagaaaatccttcccttcctacatcgcatcgatttcattccacgtcctgtttttgaggtccatctgggcgaacgtcatctcccgcgcatccaccgcgtcccaagtatttttgccgaaatccagcgtgcagggcaggtgcgccggcaggaaatcggccgcctccgccgcggccgcagtttccgatatgccgagcacctcgtgcacgttgatgtagatcccgtccccaaaatgctccacgatattgccgcggatgccggcggcgagaagctgccgctcgagcgccgcgcgcgtgttgtcgcttcccgtcacactgccgcgctcaagcagcatcgcgcgccggttctccacgctgtccgacgacggcgtgatccggaacaggcgctcgaacgccgcgagccccgccgcgtccgccgtgcccaccagcatgttgcggcgcaccgcctccaccgcgccgaacagcagggaaagccccgcgccgtaggccgcaagctccgccgaaacgatcttccccgcgccggaatacaggccggtttcccgcagggccgcccgcatgcgttccgtaattttttccatgccggtcacccctgtctctgccgctcgaagatcgtgatcccgcccgagacggcgatcttgtcggcgggcgtcgtgtaatctgccatgctctccggcaaaacgcagttttccaccgcgcccgtgcccatcaccgcggccgagaccgccgccgtcacaaacggcgcgccgaccgtcagcgatgcaaaatacgcttcgacagccgccgtgcacagcgtcttggcctcctcgaacgcaacgcccggtttcggcgtgacatacgccgtcacgaggcgcggcaccggctccgccgccgcgaccgtcacgtccacgttgatctcgcgcatcgcttccagagcggcctgcacggcctccacaaccgcctccgtcaccggcgcgccgtcgccgtacaggtagaccgccaccgtgcccgcgccgtttgcacgcggcactacgttgacgctgccgacgcccggtacctgctgcgccgccgtgcggtaggccgccgcattcgtcccgttcggcagaacgctccagctcttgagcagccgcgtgcgcagggcgtcgtcgctttccgcgtccgcaccgcccgaaaacgccgccccgttcgtcacgccctcgatgcccgctggcggcgtcaccagcgtatcgactgcaccggccgccgcgttgaacgccttgccgcccgccaccgaccgcgcgggcgctgaaacctcgagcgtccccgccgcaagcacggcgggcgccgtcgtctcaaattcagccgcacccgccgaagcggcgcacaccgtccccttcgggatctccgcatcgtagctcaggggcgtttcgcgcgaaaaggtcagtacgccctcggcgcgcacggccggcttgcgggtgaggccgcgctccagcgcgtgcagctcgagcgcctcacccgaggccgtctgcgggaacgacgcggctctcaccgtctccagcatgcagagcgccgtgtaaatctcgcccgccagcacgcggatgcggatgccggcgtccgaggcgtcgtccggcgcaaagcccgcctgcgccgcatattccgccgccatgcgcgcgcggatttcttcatacgtcatgcttttctccctctcctatcctgttcaccgtcacacagcccgcgccgagcggcgtctcgagaaataccgccaccgcgtccgccgaaacctcggcgcgcaccgcctcaagctccgggcagtccgcaagcgcctcgcgcgcaaggccgagcgcctcctccggcgcatgcctgccggagagcgccgcccgcggcaggcggctgccgagcgtccggtcgtaccggaacgcaccgcgcaccgcgttcagcctgttgtaggcgcgctgcaagagcgcgtcaagccctgaaagcgtctcgggcaggccgaggccgttcagacagaccgcaccgtcccgcaccttaatctccatcgcccgccgcctttcccggaaacacctgcccgttgatgacgaccgcgccgtccgcgcgcagtaaaatctccgcgccgcccgccgaaaacagccgcacctcgccaggcttcagccccgccgcgccgttgaccgtgccgaggcagacgccgctttcgggcagcatgacgaccttttcgccctgcggcacacacacggccatgccgaacggcacggcgacgaccggcgcgcggcgctccatatcggtgcgcaccgcgatttccgggccccccgtcgtcacaacgcctgtttttgcgcccgccgtccgcccgttccgccaaaaatccattggtttctccatccctttccttttaaacttcatgcccgccccatccccggcgccgcagcgcccgcacagccggttatccggcgctttcgcccggctcaaacacaagctccgtctcctccgtgccgtgcgtcaggctgtagcgcatggcgcggagccgcatacctgcgcacgcctcgccgagctgcaaaaagctgcaaatatcacccggttccgcgtccacaaagcccgcgcagacggcgcgcacggaaagcgccgcgcgctcgccggccgcgaagatctccgccggggaggtccccgcatccgccgcccggtagcgcacgcgctgtacgccgcccgccgtcggattgtcgaaaaccgcgctgtacgcgccggtgcgcgtgctctgcaccacgacgcggctgatctgcgcagacggcagccgccgcttttcgagcgaaactaaattcggcagcgccagcgttttcggtatgcgcggcgaaaagcacagctttcccgcgcgcgtttcatacggcgtaacgtccaaaaatcgctccgaaaaggcgcacagcgccgcccagcagctcgtgcccttttcaatgacgagctcgccctgccgcgcgcccgtctccccgccctcggcggaaaggccgagcgggcgcagaagccgctgctccatcagccgcagcgagggcatgcggagcgttcccggctcggcttcattgtcgagcagcagggccgcccggctgcgcagcgaaaagaacgtcgatttctcccccttttcaaagcgcaccgtctgttcgtccacgatgccgtcaaacaccgcctcgccgctgtattcgagccgtgccgtgcatggcgcaagttccgccggaaaatcgaacgcaaagaaaagctccaagctgtccgccggcgcgtccgcgtcccgcttcagcgtcagcccggcgggcggccccgccatcagctccgcgccgtccggcgtcgaaaaaacgaccctcacggaatatgcacctcctcgccctcctgcagcgcgccgatacacgcgatgtgccggttcgcctttaccagcgcgtcgatcggaacgcccgaaaaatacgcgtaatcccacaggctttcgccgccgcgcgccctataggtgcggcccgaaagcccggacggcgcgccgcctgtctcgacaaactggaagctgtagccgacgacctgcttcgcctccacgccgagcagcgagagctcgctcagcaccgcctcaaacggcgccctgccgggcagaaacagcgtctgcaccgtgccgaacagcgcttcgaggcgcaggtaatccgccatcgccgtctcgccagtaaaataccctttcccgctcacgcgccttttgtacgcgccgacgcgctgcacctgctccgcgccgccgggcgcaatgctctcgcgcagcagcgccctgtgcgccaccttgagctccgccgggtttaccgggaattcaaacgcgccaaaccgcatcgccatcaagttcgccatatccatcaccagcccatccgtcattctttccgcccggcgcagggcgcatcggcgagcgcccgcgccggcttctcctcatccttcatactatgcgcccgcctccgtttctgcctccgcgggctgcataccgccggcctcaatcaccgctttgcccgcaccgcgccgcttccacgcgcacggcgcataccgcacgcccgccgcgcataccgcaaagctctcgagcgcaaacaccgcttccggcgccgcaagccccgctaccgtcagccggtacacggtctccccggcggcgagcgtgtgcggcctttcctcacctaccgagccaaaccgcagcgtttttgtctccgtctccaccgatacgctgtccgccgtgcagacggtgccgccgatctcgaccgcgacgcggttctccgccgccgcgtttacagccgcctccaccgtgcagggcgtcaccgtgcaccgcagcgcgccgtcatatctcgtctcgccgcgcgccacactgcgcaccgtacacggcagtgcggagagcgccgcgcagaccgccgcaaaaagcggcgcggccgaatctcccgccgccgtgtacagccaaacgccgagcttcgcactccccgcgccgcccgtcaccgcctcgctcaaaagccctacgcagacgatgggccgcgccggcctgcggaaaaacgccccgtcatacgcagcgcgcacctcggcctgcggcagcgcctcccgcagccgctccagaagcgccgccgccagctcactgcccgtcatgtgcctcccgcctttcctccaaaaccgcctccacatacacacggccccgaacacccgcgaccggcgcgcattccagcactgtgtacagaccctgtgccgtctgcaccgtcgcttccccgccggcgagcagctccgccgcatcgccgaagtagcggtagagcggcgacggaacgcttccgcagtgccgcaagtcgggcgccgtctcctccgcaccccgcgcggccgcaaaaacgacgccgcggcgcttgtagaccgtcccgtccacgcgcacctcgacccgcccggcccggcggaacagccgcgtcatccttcccatgcacgcaccccgccaaagtaaaagccgccgtcggacaggccgcagaccgccgcggcgcacgccctgtagtattcgagcgcgcgggcgcagttgttcttgtattcggcgcgcacgtctccggcggtcaggctgtccggcgcgcacgcggcgtcgaccagcgcgagctgatacgcagcatacgccgcggccgcggcctcgagcgcctgtgcctgtgccgccttctccgcctccgtgcagtgcaggcggctttccagcacgcgcaccgcatcgcccgcgagcgtctccaaaagtgccgtgcggtcgtcctccgtcaaaagcacaagccgcgcgagcacagcatctccgtccattttcaccgctcctttctcaggctgtaagtccccgcggcatgccgccccgccgcagcgaagcggcaagcagggaaaaactcagcccgccgtataggcaaggccctgcgccgcatcggccacaagctgcgcgaaacccgtgatcgcgctgatgcccgcgcgctccatctggcggtcgatcagcttgtcgtagtcggtgatgacctcgcccgcctgcaccatctcgagcgtgcagctcttgtcgaggccgatgagcgtcttgccgtccatcgccggcacgtgcacgagcgttgcgccgagcggcgtgatcagcctgcccgtgccatgaaagctctggcccgcctgcgcgtccttaaattccgcgagcttcaaaagcgcctgcaaggcgtccgtcccgacaagcagcgtcgtcaggctgtacggggaaagcgcaccccaaagcgcgacaagatcgtcgtaggtcggcgccgccgaaagcgttttcaccgtgatgcccgtgctttccgtgcctccgtcccccttcaggagcacatttgccgcgtcgttcatctgctggcgcgcgatgtacgcgccaatctggcgcagcatcaccgtgaacaggtcgagtttgtggaagcgcagcgcctcgtacgagctcgagagcaagcgcccgcgcttgtggagcgtcacgagcgagccgctcgtcttaatgaccgtctcgggcagcttttcgccctccttcaccgggtcggcggtcttctcgctctccccggtcgtggcctgaatcgtgcggtaatcgagcccgttcaccatcgtgacggtcgccaccatgtcgggcaggtggttcacgatctccatgccctgcttgaccgcgcgggccacgtattccggaaacagcgccgcgctctgtgaagaagtgaagaacttctccaccgtgtcgcagcccgggccgctcaccttgatgccgaagcgcttgagctggcgctggtaggcgtcgagcgccgccatcggcgtccccgcgtaattgtgcgaatcatcgagctcctcgagcacctgcgtgaagctcttgccgggcacgccgtacatgcccttttcgagtgtgatgttttcaaatgccatcgattttctctcctctcagatataaaacgcgcggtcgtccgccgcgttttcggttttttccgcgcttcttcccgcaagctgcggcgtgaccggcatcttcgcacccgccatgcggtgcagcgcctgcgccatctcctcaagtccctcgatcgaaagtcccttaacgatcgaatcgagaagcgccgcgccgatctccggctgtgcgacggcgctcagttttcggatgtgcgcgctcagcgtctcgcggtagcggtcgccgcaggccgcacgcttctcgagcgcgcgcagctccgccgtcaggccgccgtccagcgccgcgggcgcgtcccccgtttcgagcgccttcaaaagcgcgccgaccgagccgatcctctccccgctctccggcatgccggaaaagcgcttcacaacgcccgccgcgcgctgggccggcaccgcgacgaacgaaaactcgtacgcgtcggtcggctcgtcgagaatgcgcacgcagcgctccccgtcgtagagccgcccgcgctggtgcgcgcagtccgccgcgccgcagaccgagcacgtgcgcttcgcgaccgcgcagccgacgctcacctccttgcggatgccgctctcgatcgactcgataaaggccgccgtctccgcatttttcggcacgtacgcctgcgccgtaagctgggcgtacggctcgccgcgcgcggtccgcttttccggaaaatccttcacctgcgccgcatagatgcgcgccgactgcccgcggctcgtgcgctcgtggtcgagcagtcccgttttgccctcaaagagcaccgccagcttttcgagcgcgccccgcgtgaagcactcgtagtcgcggtccacctcgttgtcgcagagcacgacagaaaatgtgtacacctcctccgctttgtacgggcggcgcgtgtagcggttgatgcgctcgagcgcgccgctgtccgcagagcccgcgcccttttcaattatgccgttcattgaacccctccttcttcaggcaggcgcccggcccgcccctctttttccagcgccgccgtgcgcgccatcaggtacgccgcgttcgcgtggtccacctcgtcctgcatcgtgatctcgtcccagtcgatctcaaccgcgtccgagaagccgttcagccggagccacgtgcggcagatcttcaaaagcaccggctccaaaatgcgccggtacgcggtcagctcgctcgtgagcatgtccgcctgctgactcgacatgcgttccgtcgaggaccacgaaagccccaaaaggaacggcggcacgccgagcttcgcgacgatctgctcgagcatctgccgcaccggcacgtcgctctccatctgctgcccgtccgccccgatcgcgcggatcgaaacgtcgcccaccgccacgaaatcgctcacgcccgggccgcgcatcgcgcggctccactcctcggcgagctgcccggcgcggtcgcccgcgttcacataaccctcgttcttgcaggtcacggcgaagcgcacgttgcccatgcgctcccagttgatgccgatcgtccggtaaatgcgcagcagaacctcgctgacaaacggcaggctcttcaaaatcgacgtgccccgcgcgctgcccggcggcgggttcagcgctgaggacaaaatcagctccggataccggcacggctccgtccccgtgctccgcaccacaaacacacccgattcaagcggcgacacgagccggatctcgagatcctccagtgcggcattgtacagcgcccggatctccccgtccgcgacgacgatttcgccgaccgcgttgccgtaggtcaaaagctgctcgaaatacgtcgaaatgaagctgtccgccccgcggttcataccgttcactggcaccgtctgcaaaaagcgcgcgagcgccgcctcagcgcgcctgtccgggcagagcgcccgaaagccgcccacaaggcgcacgagcttgaagatcgccgcgtcgatgatcggcacctgctcgcgcagcgccctgtaaagcccgcgctcgcccgccgccaccggcagcaccggcgcccagtcgccctgcgtctgcaccgaaacggcggtctttttcccttttttcagaaagcccaaaagctccctccttccccgcccgtccggcgctccaccgcgcaggcaaactgcccgggctcggggagcaccgtcgagacgaaatagcggatgtcatccatcgcatggtcgttttccttcaccggcacatcgcgcgcgccgtcgtccgcccagcggtagagcgaaagctcgcgcaccgtgtccgcacagcaggcgcacaggcagatgcgcccgctcttcagcgccgtcgccgtcgcgcggatgccgttgagcacgtcgtttctcgccggcgtcaccgcatagccccggccccgcagcagctcgatgaagctcgcggccgaggggtcgcacactaccgtctccggcgcacggccctcaataaggcgcagaaaaccgcggaaatgctcctcgtcggtacggcgctgccccacctgccgcgcgtcgtagtagtattcgtcgatgcggtaccacacgccgccgctgtgcgcccaaagtcccatcgaggttgggttcaccgtgccgtagtcgatcgaaaccgcgtagcgctccgcccccgccggcggcgcagcgcacaaaagttccggcgcaaacgggtatataagcccgctcgccgccacccatttcccctcgatgaaccggctgtaaaacacgcccgtgaacatccgccggtagcgctgctgcaccgcgcggctcaggccggggttgtcctccatcgtgaagtgcaggtacagcgcattgcggctctccgccttcaaaatccactcgcggtaaaaccagtgctgcgggtgctccgggttgcagttgaaccacagccgcgcccccggcagagagcagcgcgcaacgccctgctccacgaacgaccgcggcatcagcgccacctcgtcgaacaggatgccgccgagcgtcatgccctgaatcagcgccgcgctcgattcatcccgcccgccgaacaggtaaaagcggttttcccgcccgcgaaagcgcagcgtcacgaggttttccgaataccgcgcccgcgccgcaaagcccatgctccgcaaaagcggcagcagctccacgagcacgttgcgccgcacggaacggatcgtcttgccgcacaccgcaaagctcacgcccgaaaaacgcgacatcgcccacaggaaaaacgaaagccccatgcacatggtcttgccgctgcgcaccgcgccgtcgcagatgacggccgttttctcccggtgcgggcttttctcgccccaccagcagagcacgcgcatctgcttttcggaaaacggcatcgccctcacggctgcgcaccgccctttccggcatccttttccccgagcgccgccgccccggcctcgatcgcccgcagcagcccgtccgcgccgccgtccgcactttccagctcgctcaaaagccgcagcgcctcgagccggtcgaaaaaccggatctccatcccgccgcccttcggcctgcggatctccgacaccgcgaaaagattcattttccgcagcgctcgggtattcagctcgtcgcagaaaagcagcttcaccgcgtcgcggatgtcgccgaacgccagctgccggaacccctccagcgccgtctgctcctgcatggatgaccacctccgtccaaaaattttgaagtttcccccggcgttccggcccgcggcgtccgccccacccgggccccgcccgcagttccgcacaaagcgccggcgtctcgcccgctccgccggaaaaccgcgccgaaattccgcccgcaaggccgccccgccgaaaagtcccctcactaatcccccaaaaaacgcagaaagtttccctgaaaagggaaacttttcaaaaattttcaaaaaaagagcccggcaggctttgaccccaccgagctctctactcttactgctttttacgctttacaaatgcaagcgccgtaatcacgctgcccgaaagaagcacggctgcaatccacaggaaatgcacgccgctgtccccggttttcggtgcatctacgaccggcttttccgacggcgcagctgtaggctctgccgtcgcctccggctgcgtgtccggcgcatccgtcggctccgcactcggtgccgcagtcggtgcgctcgtcggctcagcggtcggcttcgccgtctcgtccaccggcgtccacgcgatcataaccggggaaagtccgtgcagcgtcacgaccagcccctcattgattttctcaacggggcattcctcgatctctccggccttgtgcccgttgatgtcctccgtgaacatgtgatataccctgtagttttccttcggcgtatccttgggcgcgccctgcgggtagggcagtgtcacccgaacctcgccgctctccgggaagttcgccgccgaaacatatccccacgtatacccgttatccttgctcacgcgcagaataacctcaaacaggcttgccctctccgccgaatagccctcgttctgtgaaacgctggccagcagcttttctcttacctgctctacgcttcctatcccggcagcctttaagccctccgtgatctgaatcttatcctcgccctcaattttcagcatatagcttaaatcttcagcgggtttctcagttggctccggctcttctgtcgccccggaatcgggatcatatgccacccacgtgattgttccgccataattctgcataacttcctttgtccatgtagcattcccacgcggataatatgctgttaaagtatcttccaaaaatgcagtatcggcaaattccggagcatctcctaagaatctaacttctttcaaattcttacaatcaaaaaaagcatgatcttctatcagccgaactgaatcaggaattataatctcagatattcccgtgttccaaaacgcatagctctttatatctgtcaccgtattcggaatatctacttcctcaagactaacacaacctcgaaatacatttgtcgcaataacttttatgctactcggaagcttaattcgcctcagcccagaatatgggaacgctgctggtgctatttgagtcacactatcaggaatttcaatctcgcgcaggcttttacaacccgtaaacgcatgttgcgcaatactttttacaccgtccggaatctcaacagtttgtagattagtgcaactaccaaacgcattggcgccaatagttgtaactccactctcaattttgacggtggttatccttgcagcacggtcgccgcctccccacgctcctccccacggagcgttatatgcatagttctccatctccccggttccggaaatcgtcagcaagccgttttcgtccagcgtccatgtcaggttttcgccgcaggtaccgctgtccacaatactatttttgctttccgtactttcaggcatttcactcggtgtgctcgatgtctccgacgtttcgttcagcgcagtcgacgcctccgatacttcgctcggcgcagtcgatgtctccggtgcttcgctcggcgcgctcgatgtttccgacgtttcgttcagcgcagtcgacgcctccggtacttcgctcggcgcagtcgatgtctccggtgcttcgctcggcgcgctcgatgtttccgaaatctcgctcggcgcagtcgacgcctccggtgcttcactcggcacagtcgaaacctcgtccgcaaaggtcggtacagccagcgcggagaacaggacgcacaggcacagcaaaagtacacccgcacgcaatccgtttttctttctcactttcattcacctttcctatcggcttattttcgcccctctgtggaaaacttccagaagcggaccgccgataactctgaacgtattctagcatatttttcaaatatacgcaagtgcgtatacgcatttgcgtaaaaatttttagaataaatcctgaggtgatggacatgcatatcaaagatgccgtcgtacaacgctttcaggctttatgtgcggtgcggaatatccggtacaacgagcttgccgtacgctccggaatcacgccgtccacggtttacagcatgatggacccaaaacgcaaggatctctcgatcctgaccatcaaaaagctgtgcgacggcctcgaaatcacgatcacagagtttttcgacgacgaaatttttttgacgcttgagcaggagatcgtgtaaacatcaagccccccgcggacttaaagtctgcggggggctccgtttgattcgcctgtgcgaaaactcacatattgtaaagcgcctcggcggtgagcagctcgacgcccttttccgtcagcacctcggcggcgcgggcgctcttatccgtgcggatgatcacgtacgccttgcccttgtcgcggctgacaaacgcgtagatgtattccacgtcgatgccggcgttcgccagcacgcggatcaccttcgcgaacgcgcccttctcgtcggatatgccgacggcgagcacgttcgtcagcgaaaccgtcatgccgtgctccttgagcgcgatcaccgcctccttcgggcggtctacgatcacgcgcaggatgccgaaatcgctcgtatccgccacagagatcgcgcggatgtccacctcggcctccgccagaacctcagtgatctccgcgaggcggccgggcttattttcaataaaaaccgataactgctgaatctgcataacgttcctccttcaaatctcgaacatcaaatccttttccatatgccaaagaagcccatccctccgccgctatagcaagagaaaaccagaagcggtttcgccggggtgtacaaactgttcctcactgcgcgcgcttacctgtgcttcgtcctgcactttcccgcgcaaagagattacgcttccctccatgccaaacggagtttggcgaaagctaaaagcggcttcgccggggatgcaggctatttcttactgcgcgcttacctgtgcttcgtcctgcgctttcccgcgcaaagagattaacgcttccctccatgccaaacggagtttggcgaaagctaaaagcagcttcgccggggatacaagctatttcttactgcgcgcgcttacctgtgcttcgtcctgcactttcccgcgcaaagagattacgcttttctccatgccaaacggagtttggcgaaagctaaaagcggtttcgccggggatgctggctatttcctactgcgcgcgcttacctgtgcttcgtcctgcgctttcccgcgcaaagagattacgctttcctccatgccaaacggagtttggcgaaagctaaaagcggtttcgccggggatgctggctatttcctactgcacgcgcttatcgatgactcttttagctttcccctcgctgcgctgaatcgacttcggctcgagcaggcggatctttgcgacgatgttcagcgtcgactgcaaggcgcccgcgatctgcttcttcaccgcctcaaggttgcgcaccgtgtcggagaacatcgactcgttcatctccacctgcacctcgagcgtgtcgaggttgttctggcggtcgacgataagctggtagttcgggtccatgccgaggtcgagcagcacgctttcgatctgcgacgggaacacgttgatgccgcggataatcagcatatcgtcggtgcggccgcgcggcttgcacatgcgcgccgtcgtgcggccgcacgcgcatttctcgtggttcagcgcgcagatgtcgcgcgtgcggtagcggatcagcggcagcgcctccttgccgatgcaggtgaacaccagctcgccgtattcgccgtccggcagcggctcgcccgtcacggggtcgatgacctccggatagaagaaatcctcgttgatgtgcatgccgttctgctccatgcattcgcaggagacacccggcccggcaatctccgaaaggccgtaaatgtcatacgccttgatgtcgagcagccgctcgatctcgcggcgcatctcctcggtccacggctccgcaccgaagatgccggccctaaggcgcaggcttctcgggtcgatgcccttgtcgcgcacggtctcgccgatgtacatcgcatacgacggcgtgcagcagaggatatccgagccgtagtcctgcaaaatctgcacctgccgcgccgtgttgccggaggataccggaatcgccgtcgcgccgagctcctccgcgccgtagtgcaggccgaggccgcccgtaaacaggccgtagccataggagacgtgcacgaagtcgtccttcgtgccgccgatgccgacgatgctgcgcgccgcgcacgtcgcccaaaccttgacgtcgtttgccgtgtagccgacgaccgtctgcttgcccgtcgtgcccgacgacgcgtggatgcgcgtcagctcctcgcgcggcacggcgaaaagaccgaacggatacgtgtcgcgcaggtccgttttcgtcgtgaacggcagcttcgtgatgtcgtcgatgccgcggatgtcgtcgggcttcagcccgatctcatcgaagcgctttttgtagagcggcacgttttcgtagcagctgtgcacgatcttcacgaggcgctccgactggattttccgcagcgtctcgcggtcggcgcactcgatctccggattataatagttcattggaagcaactccttttatagattcagcttcgggaggccggcgcctcccgcctctttacgcgcggtagccgagcgcaaaggcgcgtttgttcatctcgaggaacttcgccggcacggtcttttcgatcgccgcaagccagctctcctccggaatgtcgagcgaggatgccatcgcgccgatcagcacgacgttcacggccttctgcgagccggcctcctcggcaaggcgcagcgcatccaccgccgtcaggcgtgcgccggccgccccgatcttctcaagcagccccgccgggtagtccgccgcgcccgtaatcacaggcatcgggtcgatcttctgcgtatttgtgacgacgacgccgtcctttttcaggtacggcaggtaccgcgccgcctcaagctgctcgaacgcgagcagaatatccgcctcgccctcgttgatgacgggcgattccacgcgctcgccccagcgcacataggtgacgacgctgccgccgcgctggctcataccgtgcacctcgctgaccttcacgtcataccccgcgtcgagcatcacgcgcccgagcacgcgggaggcgagcagcgtaccctgtccgcccacgccgacgatcataacacttttcatatcgtaaaatcattccttccgaaatttggaaacggtagctttcgcttttttcagccgatcgcctgcttcgggcaaagcgacgtgcacacgccgcagccgacgcactgcgtcgcatcgatcacggccttgccgccgcgcacgctgatcgccgggcagccgatgcccatgcacgccttgcagccgatgcacttctccgcatcgaccgaaagcgccggcttgtgcttcacggtcttgagcagcgcgcacgggcggcggctgatcacaacgctcggacattccgcctgcagcgcctcgtgaaccgccgtgcgcgtggcctttaagtcgtatgggtctacgacgcgtacatccgaaatgccgaccgcgcggcacagcgcctcgagatcgaccgcgctcgtcgggtcgcccttgatcgtgtagccggtcgtcgggttctgctggtggccggtcatgccggtgatcgagttgtcgagaataatcaccgtggagttcgagcggttgtaggcgatgtcgatcaaactcgtaatgcccgagtggataaacgtcgagtcgccgatcaccgcgaccgacttcttctccgcctcagcgccgcgcgccttgttgtagccgtggagcgccgaaaccgaggcgcccatgcagatgcaggcatccatcgcaccgagcggcgccgaagcgccgagcgtgtagcagccgatatcgccgctcacgtaagcgccctcgcgcttcaaggcgtaaaaaagccccctgtgcgggcagccgcagcacatgaccggcggacgcaccgggatgctctcctccaccgccgcgctcccgccgcgcggaaggccgagcttctcggcgatcagcttctgcgaaaactcgccgcagcgcgggaaaacgtccttgccgatgaccggcacgccgatcttcttgcagtgcgattcgatgatgtcgtcgagctcctcgatgacgtagaccgtctcgagccccgcggcgaagctgcggatcttcccgaccggcagcgggttcacaacgccgagcttcaggtaattcaccgtatcgccgagcgcctctttcgcgtacttgtacgtcgagcccgcgacgatcacgccggttttcgcgccgttgtcctcgatgaagttgagggcgcacgtctcggcccattcgcgctccgccgccgtgcgcttttcgacggcctcgtgcttcgggcgcgcaaacgccggcagcatgatattcttcgcctgatttttctcgtaaggcctgagcggcacgtcctcgcgctccatcgtatcgacgatgctgcgcgagtgcgcgatgcgcgtcgaaaggcgcaggatgaccggcgtgtcaaactgctcggaaagcgtgtaggcgagctttgtcatgtcgcggcactccgcggagtccgacggctccagcatcaggagcttcgccgcgatcgcgtagttgcgcgaatcctgctcgttctgcgaggaatgcatgcccgggtcgtcggccacgccgatcaccatgcccgcgttcacgccgatgtagctcatcgtgaaaaccgggtcagccgccacgttcaggccgacgtgcttcatgccgcagaagctgcgcgcgccgccgatcgccgcgcccgccgcgacctccgccgcaaccttttcgttcggcgcccattcgcagtagatctcgtcaaacaatgcggccgattccgtaatttccgtgctgggcgtgcccggatagctcgagacgacgcgcacgccggcctcgtacaggccgcgcgctacggcctcgttgccctgtaaaagctccttcaaattgttcatcctttcaaaccgttccgttcggaaccgtataaattgacttcattttcaaaaccgtctgcggccttggcagacgccgccgcgccgtcagtcctcaatgtttctcaggtcgagcacacgcttcgccttaccctgaaagcgctcaaggctcttcggctccgccagcgtcacctttgtctcgaggccgagcacgctcttgagcctgtcgtgaatcgcgcgctgcagggcctccagctcgcggaagctgccgagcagcgaggcgtcgatcagctccaccttgacctcgaggttgtccatgtaattcttccggcgcaccacaagctggtagtgcgggccgatcttgtccgaaatccccttcgtgccgacgagcacgctctcgatctgcgaggggaacacgttgacgcccttgatgatcagcatatcgtcggtgcggcccatcaccttatccatacgcgcgtgggtgcggccgcatgcgcacggctcgtagtggatgcgcgtgatgtccttcgtgcggtagcgcagcacggggaagccctcgcgcagcagcgtcgtcaccacaagctcgcccgcctcgcccggcgcctttcgctcgagcgtgtcggggtcgatgatctcgggcaggaacgcgtcctccgcgaagtgcagcccgcagcggcactcgcattcgccggaaacgcccgggccgccgagctccgtcatgccgtagttgtccgtcacgcggatgccgaaattctgctcgatgcgctcgcgcatctccgccgtgcagccctcgctgccgaggatgccgtgccgcagcttgtacgccgaaagcgggtattcgccctcgcgcaccatctcgctcagatagatcgcatacgacggcgtcgccacaaggccggtcacaccgaagtcgcgcagcatcataagctgcttttcgctgttgcccgaagacgccgggatgaccgtcgccccgagtttctccagcccgtagtgcaggccgagcgcgccggtgaacaggccgtagccgaacgcaatctggatgatgtccgcatccgtcacgccggccgccgcacacagccgcgccacattgtccgaccagttgtcgaggtcgttctgcgtgtacgcgccgacggtcggcttgcccgtcgtgcccgaggaggcgtggatgcgcacgatatctttcatcgggcgcgccagcatgccgaacgggtagtggtcgcggatgtcgtccttcgtcgtaaacggtatgtactggatgtccgaaagcgccttgatcttatcgcccgaggtaatccccgcggccttcaggcgctcgttgtaaaacggcacgttgttgtagcagtagtcgaccatgcggcgcagccgctcgagctgtaaggcgtcgaggtcggcccgcttcatcgtctctatatccttttgaaaaaacatcagatcacctgccccgcagcggggcgtcctttctgccggcaccggccctgcacgcggcggcaggccgtccgtacagcgaaatatcctgcgcatttgcccgtgccgcctccctcttcttgcgtcacagcatggatttaccacgtaaaagcgcgaaattctcctgtcattataccgtatttttctctacttttcaagagaaagtacgtcattcatcacaaatgggagacatttttcaaatttaatgccccatcgcctgtcgtaatcgcccgcctccagcgttttgcggcagcattccgaggtaaagcgcgccgcgcacccacaggccgcgggcaggtcctttccgttcaaaagcgcgccgagcagcgccgcggcaaaggcatcgcccgtgccgtggtagccgcccggcacgcgcggcgcgagcgccgtctctatatcgccgccgcgcaccatgcacgctgcgcccgtctgcgccgcatccggctgtatgccggtcagcaccgccgcccgcggcccaagcgccagaagcccgcgcagcacgcgcgccgcctccgcctgcgtgcacggcccctcccggtacggctcgccgagcaggttgtatgcctccgtcgcgttcggcacgatgatgtccgccgccgcgcacagccgcgccatgccgtccgccatctcgcgcgtatacgtcttatagagccgcccgccgtcacccatcacgggatcgacaagcacctgcaccgccgggttcaccgcgcggaacatcccgaaaatctcccgcacgatttcgatctgcgcggcgctgccgagaaaccccgagtaaaccgcgtcaaagcacgcgccctcgcgcagccagtggcgcgcccacggcagcatgtcgccggtcaagtcgcggtacaccgggtcgcgaaacccgcccgtatgggtcgaaagcgccgcggtcggcagcaccgtcacttcacagccgagcgccgaaagcaccggcagcactacggtcagcgagcatttacccgcgcccgaaaggtcgtgtatcgcgagaacgcgcctgttttcaaaaccttctcccatgaaaagcctcgctttcccggcgcagctcaaagggccgggaaagcgccccgcgcaccctctaccgcgccgcccgccgcaaaaaaagcggaaagccgcccggccgcaccagatggtatttgaaataattgtacccccgcggcaaaataaagtcaattcgcagtttacaggcaaaaaaaagaatggtaaaataaaggataatgcgaaacactataccggagggcaatgtcatgtacacggaaaaaaagagaaagctcatcgtccggatcggcgcgctggcactcgcgggcctgatgctcctgtccgcactgtccgccgttctgttcacctaattccgaacccgcaggaacaataaacaaaaggaatgataaaccatgtgcaaaccgaagtattatatcacgacggcgatcgcctacacctcgagccgcccgcacatcggcaatacgtatgagatcgtgcttgccgacagcatcgcgcgctacaagcgccttcagggctacgacgtgttcttccagaccggcaccgacgagcacggccagaagatcgaggaaaaagcaaaggccgccggcatctcgccgaaggaatacgtcgatcaggtcgcgggcgtcgtccgctcgaactgggacgtaatgaacacctcctacgacaaattcatccgcacgaccgacgactaccacgaaaagcaggtccagaagatctttaaaaagctctacgagcagggcgacatctacaaaggttactacgagggcatgtactgcacgccgtgcgagtcgttcttcaccgagtcccagcttgtcgacggcaagtgccccgactgcggccgcgccgtgcagccggcgaaggaggaggcgtacttcttcaagatgagcaagtacgccgaccgcctgatcgagcacatcaacacgcacccggaattcatccagcccgtgcagcgcaagaacgagatgatgaacaacttcctgctgcccggcctgcaggacctctgcgtctcgagaacatcgttcaagtggggcatcccggtcgacttcgacgacaagcacgtcgtctacgtctggctcgacgcgctgacgaactacatcaccggcatcggctacgactgcggcggcgagggcaccgagcagttcaagcgcgactggccggccgacctgcacctgatcggcaaggacatcatccgcttccacacgatctactggccgatcttcctcatggcgctcggcctgccgctgccgaagcagattttcggccatccgtggcttttgatgaacggcggcaagatgagcaaatcgaaggggaacgtgatctatgccgaggacctcgtcgagctgttcggcgtagacgccgtgcgctacttcgtcctgcacgagatgccgtttgaatccgacggcaccatcacgtgggacctgctgatcgagcgcacgaactccgacctcgcgaacacgctcggcaacctcgtgaaccgcacgatctcgatgagcaataagtatttcggcggcacggtcgccgatcagggcgccgccgaggatgtcgacgcggacctcaaggccgtcgtgaccggcacaaaagcgcgcgtggaggccaagatggacggcctgcgcgtggcggacgcaatctccgaaatcttcgcgctcttcaagcgctgcaacaaatacatcgacgaaacgatgccgtgggcgctcgcaaaggacgacacgaaggccggccggctttccactgtgctgtacaatcttgtggaaagcatctgcatcggcacgacgctcctgatccccttcatgcccgaaacggccgaacggatttttgcgcagctcggcaccgcggcgcgcgcatacgaaacgctcgagtccttcggcctctacccgaacggcaacaaggtaaccgaaaagcccgagatcctcttcgcccgcatcgacgcgaaggagatggaagcgaagatcgccgaagtcgaagcgaaaaacgcgccgaagcccgcgcaggaaagcgccccgaaaaaggacatccccggcctcgcccagatcacgatcgaggattttgcaaaggtcgagctgacggtcgccgaggtcacggcctgcgagccgatcaagcgcgccaagaagctcctgaagctcacgctgaacgacggcaccggcacgccgcgcaccgtcgcctccggcatcgcaaaatggtataagcccgaggatctcgtgggccgcagcgtcgtcgtcgtctcgaacctcaagcccgccacgctctgcggcgtggcgagtcagggcatgatcctcgcggcggacgccgccgaggacgacgtgcgcgtgatctttgtcgacggcgttccagccggcgcgaagatccactgaggcgcaccgtgattttcgattcgcacgcccactacgattccgagcagttcgacgccgaccgcgacgagctgctcggctccgttctgccgcagaagggcgtctgcggcgtcatccagatgtcggcggatttcgagagcctcgagcagaccgtcgcgctgtgtgaaaaatacgactacgtttacggcgcggtcggcatccacccggagtgcgccgccgatctgccggaaaactggctgcaaaaggtcgaaagcctgctttctcacccgaagatcgtcgcggtcggcgagatcgggctcgactaccactgggaggacgcctgcccgcgcgcgcggcagaaggaggttttcgtgcagcagctcgagctcgccgcaaagcacggcctgcctgtctcgatccacgaccgcgaggcgcacggcgacatgatggatatcctccggaaataccggccgcagggcgtcgtgcactgcttttccggcagcgttgagctcgcgcgggagaccgtctcgctcggcttatacatcggcctcggcggcgtcgtgacgttcaaaaacgcgcgccacagcgttgaggtcgcggcggagatcccgctcgaccgcctgctcaccgagacggacgcgccgtatatggcgccggtgccgttccgcggcaagcgctgcgacagcgcgatgatcccctacgacgcggcgaaaatcgccgaagcgcgcggcatcacggcgcaggaggtgctccgcgcgggctgtgaaaacgcccgccgcctgttccgcctccccgcaaacgactaaatcctttaaaaggaagcgatccgatgaccatcacctatgaatacggcggaaacctgtacatcaacatgacgaaccagtgcccgaacgcctgcgacttctgcctgcggcagaacagcagcggcagcctgtacgccgacaacctctggtacgagggcgcggagccgtcgaaggaggaaatgctcgccgatatcgaaacccgcagcctcgcaaagtacggtgaaatcgttttctgcggctacggcgagcccgcctgccgctgggacgatatgctctggcttgccggaaagatcaaggctatgggcccctatgcgctgcgcatcaacacgaacgggcttgcggactgcatcacgggccgcagcaccgccgccgaaatgcgcgggctgatcgacacggtctccgtcagcctgaacgcgccgaccgccgaaaaatacgacgcggtctgccactcgaaatacggccccgccgcgttcgacgcgatgctccgcttcaccgccgaggccgtacagagcgtgccgcatgtcgtgatgaccgttgtcagcacgatgccgtccgcagatatcgaagcctgccggaagctctgcgcggcagccggcgccgcgttccgcatccgcgaatacatcgcggaataaccgccccccctttcccggcagccctgcacgcaaaaaaggcgcgccccgcatccgtttttcggtgcagggcgcgccttttatttttatgctgcaccgtaccggtgctgtgccgtaccggcgttacgctgcgccggccgaccggacaagcaggcggtccagcccgcggcgcacggcctccaccgccgggccgagcagaaaggccatcgcgagcgtgacggccgcaaacggcgcgccaagcacatagccgagcgcgatcaccgcgaggtcgtacgccacgcgcagcacgctgaacggcactcggccccgaagtgccttgtgcagaatgaacggcagcgcgtcatacggcgccacgccgaggtccatgtccatgtagaccgccgccgcgaggacgaacagccccagcgccggaacggccacgaggacgcgcgtcagaagcggcgcgaaaaagcccgccggcagcaccatgtcccagatccagctgaaaaagtcgcagatatagccgaccagcagcatgttggcaaacgtgccgagaccgatgtgcctgcgcccgaaagccagcacgaggagaaacagcgcgatattcagcgccgcctgccacgtgccgaacgaaagcccgagtttcgccgaaaccgcaaggttcagcgccgtgaagccgtcggtgccgaagccgcacggcacgagccacgagatcgaaaagcccatcagcgccacgccggccgccatgccgagaacctgcctgaaaagcgttttttgcatactccggctcccctcagttcagcgtgatgcggaaaacgaccgggccctccgcactgaaatccgtccggatatgcagaccctccgcgtcgcgcgtccattccggcgccgcatccgtccccagcacctctacgcgcccgacgaggccgtggaacaccgtgccggccgtgtgcgcctgcatgcgcagcgagcggatgcagtattcgccgctttcgctcggcttcatcgctgcggcgtacagcttgtcgcccttcgccgtgaagcggaaatcctcgctcgtgaagttcttcttgaccgcgtcggaaaaatggccgtcctgcaccttcgtcggaccctcgccgaacgtcttccacacatgcgtgccgtagatcgcctcgccgttgaccgccatccagccgccgatcgccgtcagcaccgccgtgtcctcgtcggagatcgtgccgtccgccttcgggccgacgttgagcagcaggcagccgttcttgctcacgatatccacgaggtcgcacaggatgtcctcggccgggcggaaatcgttgttttcggtgtagcaccacgagttcaaagcgatcgccgtatccgtctgccagaaatacggcttgatgtccgccatctgcccgcgctcgatgtccggcaccgcggtgccgaacaggaacgcgtcgtgcttgtagtcgatcgcgacctccatgccccactccgcggcgcggttgtagtagtaggcggcgagccttttgaggtacggcttcgcgttcgcgtgctgaatccaccagtcaaagtagaggatgcgcgggcggtagctgtcgatcagctcgcaggtgcgcaccagccagtcgtcgaggaattccgcatccgggccgggcgcgccgaaaaggtcgtcggtattctcgggagacgccatcgagggccagtacagatcgtcgcggtccgggttctgcgggatgtcgctctcgaaattcttgccgcctcccatgaagaaccagtgctcgatgcggtgggaggaaacgccgagcgtcatcccctcggcctccacggcgtccttcagcgcgccgacaacgtcgcgctgcggccccatctcggcggcgttccagtgcgagagcgcggatttgtacatctggaacccgtcgtggtgctccgcgaccggcaccacgtaccgcgcgcccgcgcgcttgaagagcgccgcccacgcggcgggatcgaatttctccgccttgaacagcgggataaaatccttgtagccgaaatccttgtgcgcgccgtacgtctttgcgtggtgctcgaacaccttcgagccctcgatgtacatattgcgcggataccattcgttttcaaacgccggcacgctgtaaacgccccagtggataaaaatgccgaacttcgcattccggtaccattccggcggctgccaattcgacagcgattcccatgtgtccgtatacggcccctgcgcgatcaccgcgtcgatgcggcgcagcgcctccttgcagtcatacactgtattttcctcctcttgcggatgatttctacccacattatagcacgcggcgcgccgcgtgcaagaaaagaacctgccaatttcatgcaggtcttgtcgtgtttttgcagttttttatggacgcagcgccatgcgtgtggtagaataaagccgtaagaaacggagggaagcgccgatgtccatgcagtacagccttgaagcgccgttcacgctcgagggcgcatccgtctgggcggccaacatcatctttgcgcccgcgctggatacgatccccgcacatagccacggctccggctgctacgagatccatttcgtccccgcagggcgggggagcctgcaggccggcgggcgcagctacgcggtcgagccggacgcgcttttcgtgaccggcccgcacatcacccacgcgcaggtgccggatgcggatgcgcccatgcaggaatactgcgtctacctgcgcctcgcgcacggcgggaaagtgctgccgccggttttaaaggccttctgcggcacgccgttctggttcgggcgggacgacggcgaggtgcgggcgatctttcagcagatcttccgcgaattcgcgcagaagcgcacgggttacgccgtgcaggtgcagcttctgctgagccagctcatcgtgaagcttgcgcgccgctacgagagcggcccgcttgccgacgcgcccgcgccgtattccggccgcagcgacccggccaccttcatcatcgaggagtgctttctgtacgaataccgcacgctgacgctgcaaacgctcgccaaaaggctgcaattcagcccgcggcagacccagcggctgctcaaaagctgctacggcagctcgtttcagcagaaaaagcaggaggcgcgcctctccgccgcggtcgagctgctgcgcggcagctcgaagcgcatcgccgaaatcgccgaactgctcggcttctcctcgcccgagcacttttcgaacgccttcaaaaaggcctacggcatgagccccagccgctaccggaagcaaaacccgtaggccgcgccccagcggacggcgcggtgaaaacgcccctttacaacggcgaagccggcggagaaagctccgccggccttttctgccgtcctttatttcgccctgtagtagatctgattgagctttttcagccaatcgcggtcgatgccgttcatctggtcctcggagagccggaacgcccagttgccgttcggcacgccgggcacgttcatcttcgtgtctttgccgaagccgcacaggtcctgcaccggcacgatcgccgtgttcgccgggctctgccagagcgtgcggatcatcgctcggcacgaggcgctgtcgctgccgcccacagcccagtcgccgcccgggaagccgcagtattcgagcgcgtgcgcgcgctcgtgcgggagcgcctcccacagccagccgagcaccgtgttgttgtcgtgcgtgccggtgtacgccacgcagtttttcgggtagttgtgcggcaggtgcatgttgtcctgctgctccataaagccgaactgcatcacgcgcatgcagggcaggcctgttttttcgagcaggtcaatcacgccctcgtcgatgatgccgaggtcctcggcaatgattttcgggttcttgaacgtgcggttcaccgtgtcgaagaaatcggttttggggccgtcgatccactggccctccttcgcggtctccgcctcggcgggcaccgcccagtaggcggaaaacgcgcggaaatggtcgatgcgcacggcgtcgaacagcttgaagcacgcgccgaggcggtccatccaccagcggtagccgtccgcccgcatggccttccagttatagagcgggttgccccacttctggccgaactcgctgaaataatccggcggcacgcccgccacgttcttcggctcgccgtcctctgtcaggtcgaaaaggtggcggttcgcccaaacgtccgcgctgttcagcgcaacgtacatcggcaggtcgccgatgatctcgacgccgcgcgcattcgcgtactgcttcacctttttccactgttcgaagaacacgtactggataaactccatgaacaggatcgtctccgcgtgctcctccatcgcggcggcgaccgcctgcggccggtggaacttcaggtcctcgtcggcccagtcgtaccactcggcgccgatgttcgcttccttcaaaatgatgtacagcgcgtagtcgggcagccagctcgcgttctcctccgcaaaggcgcgcaccttgtcgcggtacgcctcgtcggtgcgcgtaaacgcgcggtacagcaccggaatgcggcgaatctccagaaaatcgaacgccgcggaatacgggttcgcatacatctggtcgcgcagctcgtcgtcggtcagaagcccctcgtcccgaagctgttcgaggtcgatgaaattacggttgcccgcaaaggcggaaatgctcgcgtaaggtgagttgtaggcgtccgtcggcgtaaagggcagcacctgccagtaggtgcaccccgcgtcgctcaaaaaatcgataaactgccgtgcctcccggccgaagctgccgatgccgtaggcgcccggcagcgaggagacgtgcatcagcacgccgcttgcgcgtttgtccatgtataaccactctcttttgcatgaaattctcagttttcaggcgcatcgcccctgcaatcttgtacaattataccgcaaaattccagcagatgcaatggtaatcctacacagaaaagcggctctcttttttcggcacgggccaaaaatcactccacgcgcagtaccatcgcgctcacgtcgtcctcgtgcccgtcggcgcggtcgcgcaccgcccggtcgacgatctgctccgccagaagctgcgcgtcgtcctccgcaaaattcgtcacgaggtcgcagagccactcggtgcccgcggcggtcacaccgtccgaaaccatgacaagcagatcgcccgattccaaatgcttctcgctgcgtgcaaagcggatctccggcagaataccgaccggcacgcttttcgcctccagatactccgccttatggcggcggcgcagcacggtgcccgccgcgcccgcctttctgagctgcgtttcaccggtaaagagatcgatgcaggcgacgtcgagcgtcgcgagcgattcctccccgccctttgcgagcatcgcggaattgatcatgcgcagcgtgctctcaaagccgatgcccgcttttaggagcgagtgcgccatcgaggccgtcatcgtgccgtccacggcggcgcgcccgccggtgcccatgccgtcgctgatcagcgcgaaataccggccgctgccgtctgtgaacgaggccgcgcagtcgccgcagagcgaagcgccgcccgccgcgtgctgcgcaaagccgcgctctatcgcatacaccggcttctggcacatctgcagcttgatgcgctcgccggccgccgccacgctcggctgggcgaaggtgcgcccgcaggccgaggaaatctcgcgcgtgagctgccccttattgatgtgcacgccgcgcgggcgcatcacgtgcgcctccacggtcatgcggccgaatttgtcgatgcggcagcaaacctcaatcggcgtcagctcgcggcggcgcagcacctcgcgcacctgctcggcgctctcctcgtcgaagcgctggtactgctcgaattcttccgccatatccccgagcatctgcgaggttgagcggaaatgctcctccaccacggcgcgcacctgctcggcgcgcattttggcgctctcctttgcgagcagctccttgtattcgccgttcaccgcgtcgcggatctccccggcccgcccgcagcgcgtcagaaacggcacgtcgaaatcgctgcggtccacgcgcccgtgctcgcgcagcgggtagctcagccgcgaaaagctcttctgcgtctcgtccttgtttttgcgccagcacacggcgcactggctgcaccccgagcagaccttttccgccgcgcgcccgtacacgcccggcaggtcgtccgccgccgtatcctgcaattttttcgagatcttatcgacggattccgatgcgccgcgcatcgcgtccgccgcatagcgcagccgcagaatcacgttttttcgcagcgaatcgcccggcagcttgtcccggcgcacggcgaaaaggtttgaaagccgccggctctgcggcaggaccatgtagaggatcgacgcggctgccacctcgacggcgccgtaaaacacctgcatcgagccgctgacctgcaaggaggcgatgccgttcgagattacgaacgccacggcgacggcgatctttccgagcggagagaacacgcccgccatcaggccgccgaggccgtacgcgcccgagaggtaggagagcccggcggtcgagagcccctgcacggcgcccgccgcgatgcccgccaccgcgccgcccgaaagcccgccgtgccgcgcgcagacaaggatcgtcagcacgatcagcacgcggccgaccgaaacgccggccaccgtcagccccgagaacgagagcagcagaacgccgagcgagacgacgaccgccgccacgtcgccgctgtcaaacacggcgctttcccgccgcgtttccacgagccgcacggcgcgctgcaagaagtatgccgtgccgcccgcgaggaacgattcggcgacgtacatcgccgcgacattcgagagcgagccgttgatcagcaccatcgtcacacccgtcgcgagcagcggcagaaacgccgccgccggcgcaaaaaccgggtgctcgcgcaccgatttcagttcggaaagcgaccagcggatcgcgccgaccgcgagcagcgctgctatgtaccgcgcgggcacgtccaccggcgcggggatcaggtagccgaccgcgccgccgaaaatgaccgcccacatcgccgggaacggcgccgccgctgcggccgccgcggcaaacggcgcgtacttgccgaacacaagtccccgcgccgagagaaaccccgcgagcgccgcgaccgccagcatcaccgccttttgcacatacggcacggaaagcgcctcgcgcagcctgtcctgcacccgccgcaaactgttttcttccatattcatacgtcctcttcctttctttcgggtgtgcgccccgcacgccgctgattcctgtaacttaccgtcatctgtaagctgtagcaacattatacggaggagccgccgcaggaaaacgcgaatcccgcaggccgttttttgaatgttttgcggattgcccgccgttcgtgtcgcgcggctgggaaagcgtttcgaaaaagcgcgcaaagttttttgagcacttgacaaaaaacgaaaaagggcatagaatatcgataagatcaggaaacctgagattgggaaaagtacccgcgctcaaagcggcaaagagagctcccggcggtggaaacggagcgtgtgcggcgcggcgaatggacccatgagggcgggcgggaaaatcgcccgacgtctgccgcgttaaggctttgagcgggcgcattgcgccaacttgggtggtaccgcaggaagcgcagcctcttgtcccttgtttttggggataaggggcttttttcatacccgcgccttcaagaccgccggccaaccaattcccctcgcacccgaaccgtttatcacaagaagaaaggaagccactatggaatacaaattttcagaacgcgttttgaccctgaagccctccgcgatccgcgagatcttcaaatacgccgccgacccgtcatatatctcgctctccgcgggcaacccggcgccggaagccttcccggcaaagcccctcgccgagatctccgcaaagctgatggccgaaaacccgatcctcgcgctgcaatacagcacaaccgagggctatgtgccgctgcgcgaccacctgcgcggctatatgcgggagaagcacggcaccggccgcgatttcgacgacgtccttatcacgagcggcgcgcagcagatcatggacctgttcacgaaatcgattctgaacgagggcgagaccgtgctgtgcgaggcgccgagcttcatcggcacgctcaacgacttccgctcctacagggcgaagctcgtcggcatcccgatggatacggacggcatgaacatggaggtgctcgagaaagcgctccaaaccgagaaaaacgtcaagttcatctacacgatcccgaatttccagaacccctccggcatcacgatgagccttgaaaagcgtaaaaggctctatgcgctcgcaaagcagtacggcgtgatgatccttgaggataatccgtacggcgatctgcgctacgcgggcgagccgctgccgacaatcaaatcgttcgacgaggacggcatcgtgctctacgccggctcgttctcaaaggtcatctcccccggcatgcgcgtcggctacgcgatcggcccgaagccggtgctcgccaagatgaccgtctgcaagcaggggcaggacgtgcacacgaatatctggtctcaggtgctctgccaccgcttcatgactgaatacgactacgaggcgcacctcgagggcctgcgcgcgctctataccaaaaagcgcgcgttcctgctcggtctgatggaaaagaacctcgcgccgcacgtcacgtgggacccgttcgacggcggcctcttcgcgtggtgccacctgccgaagggcattgacatgcaggcgttcgtccagaaggcgctcgaaaagaaggtctgcgtcgtaccgggcacggcgttcctcaccgatgaaagcgagccctgcgacgcgttccgcatcaacttctccacgccgaccgacgaacagcttcaaaagggcatcgagctgctcggcgaggccgtccgcgagatgctctgagcacaccaaacacaataaaacgagccggaccgcaagtgcggaatccggcggataaaggacagggatacaaatggaaaacacagcagaaatcagaaagaaacgcgtgctgagcatgatccagccgaccggcaatttcacgctcggcaactacctcggcgcgctgaaaaacttcgtcgctttgcaggacgactacgagtgcgtttacgcgctcgccgacctgcacgcgatcaccgtgcggcaggatccggccgcattccgcaaaaacacgctctcggcctacgcgatgatgcttgcgctcggcatcgaccccgagaaaagcattttctttatccagagtcaggtacccgagcacgcgcagctcgcgtgggtgctcaactgctacacgcagttcggcgagctctcccgcatgacgcagttcaaggataaatccgcaaagcacgccgacaacgtcaacgccggcctgttcacctacccgtgcctgatggcggccgatatcctgctctacaacgcggattacgtgccggtcggcgccgaccagaaacagcatctcgagctcgcgcgcaacgtcgccgaacgcttcaacggcctctattcgccgaccttcgtcgtgcccgaggggctgattccgaaaaccggcgcacgcatcatgtcgctgcaggacccgacgaagaagatgagcaagtcggacgagaatacggcaagcttcatcacgctgctcgacacgccggaccagatcctcaagaagttcaagcgcgccgtcaccgacagcgaggcctgcgtccgctatgccgagggtaaggacggcatcaacaacctcatgggcatctacagctgcatcaccggcaagagctatgcggagatcgaaaaagagtttgagggccgcggctacggcgatttcaagaccgctgtgggcgaggccgttgtcggcgagttcgcgcccattcaggcccgctacaacgagtttgtcaaggacaaggcctacctcgaaaagtgctacagcgaggccgcgccgcgcgccgaagcgatcgcgcgcctcacgctgcaaaaggccatgaaaaaggtcggctacctgccggccatccgctgagccgcccgcgggaattgactttttcccgaaaactgtctataatgtgggcagagcctgcaacaaaacgcctgtgctgcgtgcatcctgaaaccaaaggccgcgcgggagcttcccgtgcggcctttcccggcacgcttttcgcgcgccagcacggcttttccgcctctgccgaacccggcggagcaccatgaaaaaaggatcggtgatttttaatggcaaaacacatggccggcaagcactaccgcggcgatgcgcccgagcagcgcacccgccgcccggcacaagcgctcgtgcaggacgagccggcgcgcacgtatatcgatgcgcttccgaaggatgatttcgagccggaggagccgcctgcgcggcgccggcctgcgcccgcgccgaaaaagcgccgctcgccggtcatcccgatcgtcattttcctgatcgccgccgcgctcggcatcttcgtgtacatcctttggagcctcggcatgttcggcggcaccggcattctcggcggctccctgctcgccacgccggaggccgtttccagcgcaagtcccgcgcccacggcggagcctaccccctcgccgacgccctctcccacgccggagccgacgccgcccgccatctatgacgacggcaccgagggctacatgtcctccggcatctgcatctacaacaacaagggctttgagctcttttacggcgacgacagcatggccgcgacgtatgcggaaatgatcaacgactttgccgacatgctgcccggcatacaggtgtacaacatggtcgcgccgaaccactccgaattcggcctgcccgcgcgcgtccgcgaatactacggcgaaagctcgcagcgtgaaaacaccgccgcgatctacgaaaacctttcggacagcgtgacggcggtcgatgtctacgacattttgaacctgcacaacaacgagaacatctactttggcaccgacacgcactgggcgccgctcggcgcttattacgcctacacggaattctgcgaggcggcaggcgcagaacccgccgcgctcgagagcttcgacaagacctcctacgacttcaccggctacctcgcctatgcgaccggcgaggaggtgctctacgaaaacccggatacgctcgacatttacgacccgacgttcgactacacctgcgagatgtcctacgacggcctgagcttctacgagaccgacagcatgaacacgcacgacgaaagcgccggctactcgatgtacctctccggcgatatgggctgtgtgcgcgtgacgaacaacacgctctccaccgggcgcaggctgctgatcgtgaaggattcctacggcaacgcgatggcgccctttctgacggcgagcttcgacgaggtgcacgtcgtcgacttccgctactttgaggacaatctgcccgactactgcgaatcgcagggcatcacggacgtgctgttcttcaacaacgagatgcccgccaacacctccgaccagcacgacgccatgcgcgctttgttcgactgataaaagcatacggagcaaagaaaggctctgccgcttgaagcggcagagcctttctgcaccctgcaaaaagcagcgccgccccgaaagccgggaagcggcgctgctttttatgcagattgaattcaaacggatttgtactggtccaaaaggcgctgggcgagcttcgagttgacgaccgcaaagtcgtccggctccttgtagtcgagcgtgcggagcacctcctgcgactggcggtacaccgccatctgcgtcgtctgatacaccgggtcctgccgcccgcgcacgaaaatcgcaaagcgcatttcgttttcgtcggccgcgcagaaataggcgtgcacgttgccctcgatcgaccgcttgagcacggtgacgatcgcgtttttgacgagctccaccgctgcgtcgtcgagcccggcctcaaagatcaggatcttctccttgagctcctgcgggtttttaacgctgcgctttatgagcccgcgcacagcggggatcggctccgcctttgaaaccgcgcccgagggccgcaggcagaccatgaagccgtgcgccgggtcgtggtagatcatcgggtaagccatctgcgccgtgtagccgcagtgccggcactcccagtcaaagatagattcgcgcaggatgtcccggcgcagctccgggttttcctccgcgttgacgctcgtgtacatctcgagcttctgcgtctgcccgcaggcggggcagacaatatcctttttgatttcggtagacatgtagaaacactcactttcttaaaggccgcctatgtgcagggataccgttatcgtgtgatgatgccgctgccgagcacgtaatcgccggtataaagcgcggcgacctgcccgggcgtcacggcgcgctgcggcgtgtcgaacacaagccgcgccgtattggcgcccgccggggtcaaaagcgcgcggtccggcttcgcggcgtaccgcaccttcgcctccacccaaaccggcccttcgagcgcgtcggccgcaatcaggttcagcgcccgcaggcgcacctctgtcgtgtagcggtcgccgtcgcgcccgagcgtcacggtgtttttcacggggtcgatgcccgtcacaaagcgcggctcgccgaacgtgacgccgaggcccttgcgctggccgatcgtgtagcggtaaatgcccccgtgccgcccgagcaccgcgccgtccggcgagacaaaattgcccggcccgggcagcgggccgccgaaccgctcgagaaacgagatgtagttgttgtcgggaataaagcagatctcctgactgtccggcttttttgcgacgggcaggccgtgccgctccgcgagcgcgcgcgcctccgccttgcccatgcggttcagcgggatcaccgtgcggctgagctgcgccggcgtcagcccggagaggaaatagctctggtcttttttgtccggcgagcgcttcaaaagcgcgcggccgttttccagcgcgatctcggcataatgcccggtcgcgatcttgtcgaagccgttttcaagcgcccagtccagcatcacgccgaatttgatcgtctgattgcagagaaagcaggggttcggcgtttcgcccgcgctgtacgcacttataaacgcgccgatcacatttttttcaaacgctgcggaaaaatccggcgcgaaatgcgcgatgccgagctttgcgcagacggcggcggcgtctgcaatttccctttccatcgccgcagcctgctcgccgctcaaaatatgccggggcttcaggcgcattgtgatgccggcaacatcgtacccggcctccagaagcagcagcgcggcgaccgagctatccacgccgccgctcatccccaccagaatgcgcgggccgcgcccgttattcgtaggggagctcttcactttcgtccttctccgccggcaccggctccttctctgtctccggatgcaccgcagccggctcggcgggcgcggcctccacggcctcgtctacaagcccctccggcacggtctcgtcggctgcgggctgcggcgcgtactcgcgcacgtcgtcgagcgtgatctcctcgatctcctcctcgccctcctcgcggcaaagcgcctcgagcttctgcaccgcggcgtcgatgcgctgctcggcggcctcgatgtcgatgcagtgcggctccgtcaccgtgttgcccgcgtcgcgcaggttgtggtagtagtagcggccgagcgcgaggtaagcccgctccgcggccttctcctcacagcggatcacagtacgcaggcggtttgcgagcgcgtttttgcggttcttctccgcgacgacgcctacggcatcctgcacggcgccgccggccgtcttaaacaccgaggtgatatttttcagaaaactcatggcagtttctcctttcaattttaaaatccggcccgctgcgccgcccgaaagcggccgggatacagcgagtccattttagagcttgctctttttattataatgcaaagcgccctaaaaaaacagtgttaaaatgtaaataaatcgcattgaaattgcagcacgatgccgacatccgccgcggcaggcacatctcccattcccgaagcaccgccggcagagaaaacgcgcggggcgaaatcttcaatttccagattgcttcagtatagcatgaaagccgcccgcatgcaagcgaaaacagaatcctcaccgacagggcgctctgcacggcctatgcggatgattcggtagaatttatatccgcttatccgctgttttgaaatgcttttcccgcagaattttccgattattcggatcgcttcagccgcctttactcacgcctgcgcgcagagcgcctcaatttcgcgctcgagctgccggtaaaacgccgcgatgtgcaggccgtccgcaagcgcgtggttgcacagcagcgagacgggcagcagcgttttctccccctgcgcgtaaaatttcccgaaggtgatgcgcgggttgctgtccgccggcaccggaacgggctggatgagcgacgtgtaggagagccacggcagcgtcgacacaaaaatcaggtcgcccgtgtccgcctccgattcgtcgatgctgcgcgccgccttcgcacgctcctgctctaaaaccgcatacggcaggtaatcggcgaagggctgggcgcagtcgagcgtgcagtagcagtacgtttcgtcctcgagcgcgacggtgtgcgacgtgcggcagcgctcgtattcgatgatgccgccgttcagaatgcgccggcgcagctccggcacgcggttcgccgcccgcgccgcgcagtagcagaccgtgagaaaaaacggcagccgctcgcgccggatcttctccctgagcgccgtgatatcgaccggcgccgtcgtgccgacatacgggaacgcaagccccgaaaaatattcgaaatgctgctttctcttgtagctgcccatatccagcgtcttgtattccatgccttttcctcccgcataaagccgtatttttactacttctattgtacaggatgcgcccggcttgtcaagccgccgcacagattttcaaaatacttcgaacaaatatttgaatgttcgattgacaaagctggtcctttcgtgtaacataaaaattgacgaacgcacgttctaaatcttttgcatacgaaaggaaatctgccgatgaaaaactacgccgcatgggggcttgaatatctgaaggaggccgaagcgctcaaatgccgcatccgacaggtgcaggccgaatccgggcccgacgtcacgggccagcgcgcccagcgcatccacctgctctgcgacatgtacctcgagtgcatggtgacggggcgcattctgcaaaggcgcggtgatgcgcttgagcagtagaagtccgcgccgcaacgcgcttttgtacgacgcgctgtaccgcccggcgcaggaaggggcgcacagcacaaaccggcgcgagcttgaggaggccgcgcggctgctgcgcatcgccattcaaaacgagctgaccgaccgccagcgcgcctgcctcacgctctactacatggaggggaacacgatgcaggaaatcgccgagcggctcggcacgacgcgcggcaacgtctcaaagcgcatcaaaaaagccgtggagcggctgcgccgggcgctccgctattcggcgccggggctgaaattttcccgctgagccgattgcgtcttgaaaagcagggcgcactgtgctaaaatctgtacagacaacttactcttttggaaaggaaaggcttctctatgaacctgattcacatcgacgaaaacgggctgcatctcgttttcgaaaagaaagaggacggcacctgcaagctgctgcatttttccgccctgcccttcgacgaaggcaagatacttcgcagccgcgaccgcgagaccggcgaaaaccgcatcaacaccgagcgctacaacgtgcttgagatcatgatctccggccagaaccgcccgggcgagcgccacggcaacaagtatatctcgacctcccccggcgaccgcatgcagctcgtggattttgcggacaagcgcaacgctttcggccgcaagctggaaatccggatgcacgacgatatctgcggcatcgacaccgtctcgcacatgcagttttacgacggcattcaggccgtgcgctgctggacggacgtgaagaacgtcggcaaggagccgcaggggctcgagtacgtctcctccttcgctttgaccggcatcgaaaaggagggcctgctctccaccgacgacaagatgcgcgtctggtacccgcacaacggctggcagcgcgagatgcagtggcaaagctacagcttccccgagctcggcctcgcgcagtgccagcccgcggagatccagcgctcctccaaggtgatcggcgcgacgaatatcggaaactggtccaccaaggaatacctgccgatgggcctgctcgaaaatacggaggccggctccaacctcttctggcagatcgagcacaacggctcgtggcactgggagatcagcgaccagatgggcagcttctacatccagctcagcggcccgtccgagacggaatcgcactggtggaagaatctccagcccggcgagacgtttacaaccgtgccggtgtgcgtcggctccacgatcggcaaattcgacgacgcgatgggcgagctgacgaaataccgccgtgtgatccgccgcaagaacgacgacaatgaaaagctctgcatcatcttcaacgactacatgaactgcctgtgggcgaacccgacgaccgcgaaggagctcccgctgatcgacgccgcgcacaaggccggctgcgaatacttctgcgtggacgcgggctggtacgccgcgggcttctggtgggacaatgtcggcgagtggctcccgagctacgagcgcttcccgaacggcctcgaggaagtcatggactacatccgctcgaagggcatgatccccggcgtgtggctcgagatcgaggtcatgggcatctgctgcccgaaggccgcgcgcgtccaccccgactggttcttcacccgccacggcaaaaaggtgcacgaccgcagccgctggcagctcgatttccgcaatcccgaggttgtcgagcacgcgaacgaggtcatcgaccgtctggtccgcgactaccacgtcggctacatcaagatggactacaacatcgagccgggcatcggcaccgagctgaacgcggacagcgtcggcgacggcctgctcgggcatgagcgcgcctatctcgcgtggctcgattccgtttttgcgcgctatcccgacctcatcatcgagaactgctcctccggcggcatgcgcatcgattacgcgatgctctcccgccacagcatccagtccacgagcgaccaggacgattacctgcggtacgcttcgatcgcggcgaacgcgcccgcgggcctcacgccggagcagagcgcgatctggagctacccgatgaagggcggcgggcgcgaggaggccgtgttcaacatgtgcaacgcgctgatgcagcgcatccaccagagcggccatctcgccgagatccccgaaagcgacttcacactcgtcaaggaggcgctcgactactacaagacgattcgcggcgacatcaaggtcgcgctgccgttctggccgctgggtacctcccgctttacggacacgtggatttgcctcggcctcaaaacggagcacaaggcgtacatcaccgtgtggcgccgcggcgcgccggacggccgctgtgtcctgccggtcgatttcctgcgcggccgccgcgacgtgaaagtcaaatgcgcctacccggaaaaccacggcacggcctgcgcgtggaacgccgcacagggcacgctgaccgtcgacctgcccgcaccgatctgcgcccgcatctttgagctggaatactgagatgacggcggcagagatccggcaaaagctgcaaggcatccgctgcttcgtgctcgatatggacggcacgatctacctcggtgagaacctcttcccctacacaaaggatttcctcgccgccgtggaaaaaagcgggcgcggcttctgcttcttcacgaacaacagctcgaaggatacggacacctacctgcaaaagctcgcccgcatgggcattgcggtcccccgcgagaggatgctgatctccaacggcgtcgcggcggactatatgctctcgcaccacccgggcgcgcgggtcttcgtcctcggcacgccgcttctgcgccgcgagctcgccgctttcggcctcgagatcgtcgaggatgccccggacgcggtgctcgtcggtttcgacacgacgctcgaatacaaccggctcgcaaaggcctgcgatttcatccgcgcgggcctgccggtgtacggcctcaatcccgacctgaactgcccgaccgaaaccggcttcatcccggactgcggctcgatcgcgaagctgatcgagggttccacagggcgcacgttcccgttcttcggcaaacccagcccgctgacgcgcgcgtatatcgcgaagcacaccggcctttcggaatcggagattgcgatcgtcggcgaccggctttacacggacatcgcgctcgccgataacagcccgatgtgctcgatcctcgtgctcagcggcgagtcgcaggagagtgatatcggcacgatgcccggcgcgcccgacctcgttttccgcgacctcgcggcaatcatcccctatctgtaaagtcaatatagacgaaagacgcccgcaggcgctggaaaaccggcctgcgggcgtcttttattctcttttggtgcacggatacggcgcccgctcgtcggtcaaaccaagggcaaaagcggttatccgaaaatccccttggcctcgtccatgcgctcgaccacgtggacgccgaacggacagcgcgtttcacagccgccgcaggcaatgcagtccgcggcgttcgcggaaaggttgttgtagtgctcgcgcagcgaggccggcgtttccggctgcatcttcgcgaggtcgagcaacttgttgaccatcgcgatgtcgatgcctgcgggacacggcgcacagtggccgcagtaggtgcactgaccgctgtaagcgtgcttcggcgcattggcgagcacgctcgcgtagtccttctccgcctccgacgccgtttcgtacgcgacggccgcatcgacatgcgccgccgaatcgaagccgaccatcacacttgcgacggccgggcgcgtcagcgcgtagtgcaggcactgcaccggcgtcagcgccacgccgaacggggactgcgccgccgtgaacagccgcccgccggcgtagcccttcatcaccgtgatgccgacgccgttctgctcgcagatgcggtacagcgcggcgcgctcgggcacgatgccgccgagcgcctcgtcatacgtctccgcaaagtaatcatcgagattctccgtcgccggcaccatgtcgaacgccgggttgacgctgaacaggatcatctcgatctcgccgtgctccgccgcaaggcgcgccacgtcggggttatgcgtcgaaaggccgatgtggcggatcgtccccgccgccttgaggccgcgcacgtactcgatgaacgcgccctgcatcacgcgctcgaactccgccttttcgtcgacgtagtggatcatgccgaggtcaatgtaatcggtgcgcatgcgcgcgagcagatcctcaaacgcggccttgacctgcggcagatctcgcgtgcggacgtactgcccgttctgccaagtggagccgatatgcccctgaatgtaccacttttcgcgctggccctcaagcgctgcgccgatattcgcgcgcacattcggctcggacatccagcagtccagaatattgatccccttttccgcacagtaatcgacgacggccttgacctcctcggcgctgtgccgctcgagccattcgccgccgaggccgatctcgctgacctgcaggcccgttttcccaagacttctgtaacgcatacaatcacattccttttccgtttatatgggcgggagcctccgccggacatcggccaaggctccccgttctctcgctgtggataaaatcacgcgatttcgatcagctcgtattcgcgcgtgccgtagccgagcttttccgccgcctcgatcgtgtgcacgccgtttctcgactcgatgcgctcgagcaggtgcgccttgcccgggtcgtccgacgcgtagacgaggtcgaggcaggcctgatcgatcgcgatcgggtcgagcgagacgagcacgccgatatcctgcatgcaggggtcctccgccaccgcgcagcagtcgcagtcgaccgacatgttcttcatgacgttgacataggcgatccggtccttgaaatactcgacgacggagcccgccgcgtccgccatcgattcgaggaacaagtcgtggtcggcggtccagagcttatccggatcacccgcaccgtggatatacgccttgccgaacgacgacgcgacgccgatcgaaagctgcttgagcgcgccgccgtagccgcccatcgggtgccccttgaagtgcgagagcacgagcatcgaatcgtaattttcaatatccttgccgacgtaatttttccggatcaccgcgccgttcggaaccggcagctcaaggtccggcccctcggcgtcgagaatatcaaccgcgaaatagcggctccagccgtgctgctccatcgtttttttgtgcttttcggtcgtgttgcgctctccctcataggccgtgttgcattcgacgaccgttccgccgaccgcctcgatcacgggctgccagaactccggccccagaaaattctggttgcccacctcgccggaatgcagcttcacggcgactctgccgggcagcgcacagccgagcaggcggtacatttcgagcaccttttccggggtgatcttccgggtgaaataaacctttgctttcatgacaaatcctcctgagattttgccggcggtcctctccgccgtccgtaaagccctgccctcccgcgcaccggcctgcccggccgcgccgcgcgagggcgctcctctgtctttaattatatagcttaaaccaaactggaagtcaagccctttttgcctcacgccccgtccgtcgcgccgcggtccaccgtgaccaccgcgcggagcttcgggtcgatttccagaacggcctcgccgatccgccggcggatctcgccgtccgcatccttttcctcaaagggcaccgcggcgtcaaagacgacgttcgtatgcgtcacaccccagaccacgcggaaatcgtgcagcgtggcggccgggtacaggcgcccgaccgcctgcaccacctgcgctttgagcgcgtcggtccgcgcgtcgccgaccacgaccgggtcgagatggatcacaaggtgaatgccgagatcccgctcaaaatcgcgctcaatgttgtcgatgcggtcgtggctttctaggatgtcgcagcccgcgtcgacctcgcagtgcaccgaggcgaagcagcgccccacgccgtagctgtgcacggtcaggtcgtgcatgccgatgatgccttcatacgcaaggatcttatcgcggatctcacgcacgagcgcgctgtccggcgcttggccgagcagcggatctgccgtggaaaggatgagctgcacgccggagacgacgatgaaaagcgccacgagcgcgcccatgtagccgtcgaggttgacgtgcgtcaccatcgtgacgaccgcgcctgcaagcaccgcggcggtcgcgatcacgtcgttgcggctgtcgttcgacgtggcgaacacggcctccgagcggatcagctttcctacccggcggtagaagaggcactgccagagcttcatgagaatggagataaccagcacgatcagcgccgcgggcgtgagcgtgttttcctccggcgtcacgatcttttccaccgaggagagcccgagctgcaggccgagaaacaccacgatgaacgaaacgatcacacccgaaaggtactcgatgcgcgcgtggccgaacgggtgctgcgcatccgccggcttgccggcaagcttaaagccgacgagcgtgacaatcgaggagccggaatccgtcaggttgttgacggcgtccgccgtaatcgagacgctgttaaacagcgtgccgaccgtaattttcatcgcaaagagcagaaagttcgtcacgatgccgacaacgcccgccacgcgcccgcagcgctcgcgcaccgccgggctttccgtgttccgccagtcgcgcacgaacagccttaaaatcagatcagtcaacgaatcgctccttccaaaaacggattagacaaaaggggcagagcccgcttgcggggccctgctccgatctgtttcgacaaattttattttacgcagaagaattcgaccgtttcgccgcaggcgccggtgcagaacgcgatgcgcgcggagagatccgcgagcgtgacgtctttcggctcaatcgtcaccggatagcccgccgcacggacgcgctcgatgcacgcgtcgacatccttcgcggcaagcgccagatgcgcaaatttgccttcgtccggcagcgcctcctcggcggacacggggagaacctcgatgcagctgttgtcgccggtggagatcatcgtgcaggggtagcgctcgtcgccccagcgccgcacaacttcgagccccagcagccccgtgtaaaattccataaccttgtcaaactgctccttctgcggcttcagcgccacatggtgaataccctcgatcaatcgcataacacattccttcccgcaggccctcggaaggcgccgcccaagcgccgcggcgcagcgcaccgcagcacggcggcccgccgatacggcccgcatgcaaattataaacaagctgagggtatcgaaagcgctaccctcagcccattacatccgtaaaattactttctgttgaagatggacatgatgtccgagaacgtatcgtcgtcatcgacaacgctcgacgcggcgcggtcgccggccgtcgaagccgtcggcgtgccgaagagctccgcatcgctgatcgccggtgcggcggccttcgcgttgttctcgccgttcatgccgtcgaagccggttgcgatgaccgtgaccatcatctcgtcctccatcgagtcgtcgaacgcggcgccccagatgatgttcgcatcctcgctcgcacgctcggtgatgagctgggaagcggtatcgatctcgtcgagcgcgatgtccggcgaggacttgatgttgatgataacgcctcttgcgcccgcaatcgcggtctcgagcagcgggctcgaaatcgcggcgatcgcggcctgctcggccttatccttgccggccgcacggccgacgcccatgtgcgcgtagccggcgtcctgcatgatggacttgacgtcctcaaagtcaaggttgacgacgcccggaatctgaatcaaatcggaaatgctctgcacgccctgacggagcacatcatccgccacgctgaacgcgttggcgagcgtgatgcgctgctcggagacgagcttcaggcgctcgttcgggatcacgacgagcgaatcgacgtgcttgcgcagctcggcgatgcccttctcggcctgctccatgcggcgcttgccctcgaaggcaaacggcttcgtgacgatgccgacggtcagcgcgcccatatccttcgcgacctccgcgacgatcggcgcggcgcccgtgccggtgccgccgcccatgccggcggtaacgaaaaccatgtcggcgcccttgagcgtggcggcgatcagctcgcggctttcctcggcggcctttgcgcccacctcgggcttcgagccagcgcccctgccctgcgtgttcttctcgccgatctgcacgcgggtcttggcctgcgagcgggaaagagcctgacggtctgtattcatgcagaccagctcaacgtgctgcacgccggccgaaaccatgcggttcacggcgtttccgccgccgccgccgacgccgacgaccttgatggtctggggagattcttcaagcatgttatcgatttcaaaaggcatagtgatttgttcctccttgatttggtctccggcagcttgcggccgcggggattccttcgctttatgcagaactgccgccggaagtttcgctgggcgacagaaaatatccgtcttttcaactcgtgtaaagccgattcactttacacgccgcgtattatcctgcaaaaaatctgtggcttatacagtataatctaacacttttctgttaaaaatgcaagacgaaagatgcaaaaaaactgccatccggcaaatatttttactttacagcgatttttcgcgggagcatggcccgccttccgttcaatttgacataaaaccgggataaaccggctggaaatgacagggaaccgcgcgttattcgccgtctgttccgtcgtctgcggccgcgccgttctccccgtccgccgcggcggaagcgctgtcctccgaactgctggaagcaagctcgcggcccgcgatgccctccccttccgaggtttcgccgccttcgagcgtttcacggaaaaaagccttgtttttctcggccgccaccgtgaggtcgatctcgccttgagtctcctcggtaaggtcgccgtcctcctgcatttttgccagcatgccgatgccgaacatcgtcttatactccatgtcgttcgtgttgccgaaccggaacacgatgcggtcgtcgtacgtcatcgtgatatcgtactgattgcgcaggtcgatctccgtgatgccctcgaggccgtgctcctgaagctgggcactgatctgcccgaagagctttccggccacttcctcctgaaactccacctgcccgctcggctcttcattcaccggcgtgcagccgtgcacgacggcgctgccctgcgcagggctttcggcgatctccagcaccttgccggtgcggctcacatacaggtagccgccgctttcccgctcgatggaaaacgccgtttccgcctctgtgatgacgatctccaccgtcgaggggatgtgctttttgatctcaacgctctcgatatacgggaagcggtgttcgagcgcctcctcccgcgcgccggtttcgagcaaaacgaggttatcaccctcggcgatgctgcatacacttaggatatcctcctgcctgtaggcctccccgcccgtgaccgtgaccgtgccgacgcggaagaaaacaaaggtacacagcagaaccgcaccgatcaccaccgccagaaaggccgatatgtaaaagatgacaagggctctgccgcgcgcgcgccggtccattttcactttcttttccgccggtttccgcggcttttcgccggatcttcctgccatttttacgtcctctcctttcttcttttcacagcgcggcgccgcgccgaagattttcaaatgccgttttgctgaaattttatatcctgtagacctctgcgccgaggctgcggaggttttcctcaaagcgctcgtagccgcggtcgatgtattcggggtgcatgatctgcgtttcgccctgcgccgcaagccccgccgcaacgagcgccgcgccgccgcgcagatcctgcgccgaaaccggcgcgcccgaaagcgcgggcacgccctcgatgacggcgaccttgccctctaccttgatcttcgcgcccagacggttcagctcgccggcgtgcttgtagcggctttcaaaaatattttccacaaagatgctcgtgccgtcgccgagcgccgccatcgccatgaccggcgcctgcgcgtccgtcgggaagccggggtacggcatcgtgcgcacatggcgcacgggctttaagcgctcgggcgcgcggatcagaagctcgtcgccggactgcatcacccggcagcccgtctcctcaaatgcggagagcaccggcagaagatggccggcgttcacctttttcagcaggaccgtgccgcctgtgacggccgcagccgccatgtacgtcgccgcgacgatgcggtcgggcatgacggtgtattcgctgcccgaaagcgcgggcacgccctccacaatcaagcagctctcgcccgcgccgtagatgcgcgcgccgcactggttcaggtactgggccagatcgacgatctccggctcccgcgccgcgttcgcgatgacggttgtgccgtgtcccgtggcggcggcgagaagcagattctccgttgcgccgacgctcggaaaagccagcgagatgaaaccgccccgaatccccttcggcgcgcggcacagaaggcagccgtgctcctcgcggatctccacgccgagcttctcgagcgcggagagatgcaggtcgatcggccgcgggccgatctcgcacccgccggggaacgagaggctcgcctcgcccgcccgcgccagaatcgcgccgagaaatacaatcgacgagcgcatctcccgcatcagattgtgcggaatatcgcaccgggacatgccgtccgcacggatgaggagcgtcttgccccggcgcacgcagcggcagccgagccggcgcagaatgcgcactgaaacgccgacgtcggagagctccggacagttgtgcagcaccgtttccccccggcacacgacggccgccgcaagaagcggcagcgtgctgtttttcgcaccctgcacgcggagctcaccccttaacgggcggccgccgcgcgtcagaatcgtttccgggcggtcgcagaagcgctccgcgccgggccgttcgatacagatattgatggacgccatacgcacacctcgcagcatttgatacgcccatagtatgcgttttcgccccgatgcgttcggcgcccaaaacgggtgcggaacgcttttatttcgccttcgaccgaatgatctgataaatacgctcgttcgcgtcgagcacggccatcgccctcgcgttgcgcccgatttcctcggcgcggccgggctctgagagaatgccgcatacggtctgccacagcttttcgccggtcaggtccttttcctcaatcagcacggcggcgtcccggctgacgagcgccatcgcgttgtggaactggtggttctccgccacgttcggcgaggggatcaaaatagagcacttgcccgtcgcctcgatttccgtcagcgtgatcgcgccggcgcggccgatgacgagatccgccgccgcgaggcactcgggcatgttgtggatgtactcgagcatccggatctgcgggttctccgcctcgcggacgcccgccgcatgggcctcgccgagaaatttttcgtcgtgctggccgtagccgtggatgtgctggtacttcttttccttcgcgctctcgccgagcatgtaggccgccgcgcggttgagcgccgcggcgccgaggctgccgccgaatgagaggacgagcgggcgctcatccagcccgagcgccttgcgggaggccgcgcgctcagccttcagcaccgaggtgcgcaccgggtttccggtgaaaacgcagttatccgtgcgctcgaggtatttttttgcgtcctccacggcgagcatcacgcagtcggcgtgcttcgcgagcatcttcgtcgtgacgcccggatacgcgttctgctcgtggatcacggtcgggatgccgagcttctgcgccgcgcggatcaccgggccgctgacatagccgccggtgccgacgcagatatccggctgaaactcccggatgatcttttttgcctccgccgaggccgagaaaacgcggacgaccgtctgcgcgttgcgcttgatgttcttgagggagagcttgcgctggaagccggagatccggatcgtgcggaacttgaagcccgccgccggaacgaggcgctcctccatgccgcccttgttgccgacgtacaggatctgcgcgtccggctccttttccctgagatagcccgccgccgccagcgccgggttgatgtggccggccgtgccgccgcccgcaaataatactcgcatactgataaccccttattcagattgtggccccggccgcacagccggatacggcccgagcaaagcgccgagcgctacgtcttttcgatgttggagtgccgcgaaatcgagagcaacacgcccatctcgcacaaaagcatcacgagcgccgtgcccccgtagctgaaaaacggcaggctgatgccggtattcggaaacgtgttcgtgacgacgcagatattgaacaccgcctgtatgccgaactggaacgtgatgccgagcccgagcatcatgccgaagcggtcgcgcgcgtgcagcgagatatagacgccgcgccagatgaacagcgcgaacagaatgatgacgagcagcgcgccgatgaagccgagttcctcgcagatgatcgcgaaaatgaaatcgttctgcggctcgggcaggtagaggtacttctgccgcgactgcccgatgccgacgccgagcagctgccccgaaccgatcgcatacagcgactgcaccgtctgccatgtatcgacgccctccggcgggttgaacgggtcgagccagccgtagatgcggtccatcgcataggcgaatttatcggaaaacaggagaacgcaggccagcgcaacgccgccgatcacgccgatagcaacaaagtaccgcatcttcgtgccgccgatgaacatcatcagcacggcgatcaggcagataatcagcgtggccgaaacgtggctttccagaaagacgaggccggcgatcaccacgaggatgcccatgaacggcagaaagccgaagcggaatgttttcatcttcgagccgtacagcgcgataaaatgcgcgaacatcaggatcagcgcgaatttcgcgatctccgacggctggaattcgatgccgccgatgttgatccaccggttcgcaccgtttttgaccggcgcgatcttcgtgcccttgaacgcgagcaccatgcccaaaagcacaacggcaatgccgaaaacgatgatgttgaatttatgcaggtggtgatagtcgaaggtggagatcagcagcatggccgcgacgcccaaaaccgcgaacatcccctgccgcatcacgaaatggtagctgttgccgtagtagtaatacgcataggcgtagctcgcagaaaacagcatcacgagcccgactgcaagcagcacgaggatcaaaaacagcatgggcatatcgaggccgaggccgagcgtgaagagcttgtaacggatgcgttcgcgccgccggaccttccgcgccgccgcagaggccgcctcgtcatccggaatgcgcaccggcgcactgcgcggtatgcgctccagcccgcgggctgtggatcttctggtttgcgccatatcggcaaccgctcctttttctcagattttccgcccgccggctgcggcgggctgcaaagcatagtatggactaaaaaatgggatttacacttttatgcgccgaagcagacgagcagaaccgccagaatgcccgcgaccagcgttacgccgctgaacacaaagcacaccttgttctccttccagccgcacatctcgaaatggtggtggatcggcgccatcttgaagatacgcttgccgtgggtcagcttgaagtagccgacctgcagcacgacggagaggatctcgacgatatagatgatgccgacgagcagaagcagcaccggcatgttgacgccgaacgccagcgcgcacacgtagccgccgagaaacagcgagccggtatcgcccataaagacctttgccgggttcgcgttccagaaaaggaagccgatcagcgcgccgaccatcgccgccgcaagaatcgaaagccccttcatgctgagcatcatcgcgatcacggagaatgtgaggcacacgacgatcgtgaccgagctgttgaggccgtcgagcccatcggtgaaattgaccgcattgaccataccgacgatcagcaccgccgcgatgaagtagtaaaatacgccgagatcaaccgtgccgatgaacggcaggagcgtctccgtcgtaccgccggccatcgaaacggaaacgaggtacgccgccgcaatgatgaactggagcacgagcttctggatctcggtgaggccgagattgcggtgcttcttgatgctgatgtagtcgtccataaagccgacgaggccgaagccgaccgccatcagcgcaccggcgacgatgcgcacgagcatgagctgcgtttcggcgccgccgtgcatccagagaaacgcgatgcagacgaccgccgccgcaagcccgccgatgatgaacatcaggccgcccatcgtgggcgtgccctgcttattcttgtgccagctcgggccgacctcccggatcgtctggccgaatttgagcttgtgcagaaacggaaccataaatctgccgagcaggccggtgatgaccgccgctgcgacaaccgcaagacaatacaaggtgatttccataatgatgaactatcctttccgtttaccctctcgttttattcctccgtgctcccggctgtattgccaacggcttcgacgccgccggagctgacaaaggcaaccttgatgaccgagccgcgcttcacgcgtgtgccggccgcaatatcctgcccctgcgcatagccggagctcccgctgccggagacgacgatctgcacgccgtatacctcggccagataattgcagtcgtctaggctgcacccgacaaagttcggcacctcggcgtaatcctcctccttcggctcctccacatacagcgcgaccgtgccgttcttcgggatcgcagcgcccggcgacggcacctgcgtgtagacgatcgcctcgtcctcgttgtcgcccgtataatcgaccaccgtggagctgtagccctgctcctcgagcagctgcttcgcctccgcgatcgtgctgccgatgacattcggcgcctcgtccgcgaggttttcgtactcggattccgtgtactgcgggtcaacgccgaggtacgggaggatctcctccatgatcgcggcgaagatcgggccggcctgcgaaccgccggaagcgccgccgatctgcggctcatcgtaaaagacgagcagcgcatactgcgggtcgtccgccggggcgaagccgccgtaggacacgacgtactgcatgccgcggtccttgccctcggccagctcctgctgccgcaccgcgaccttttccgaggtgccggtcttgccggcgatgcggtagcccggcacatagccgttcttgccgctgccgctcgtcgcgttgcgctgcagaatcgccgtcatgcgggccgaaacgtcctcggaaatgacctgccgcttgtagctcgtgtcggtcgtctgcacgacgttgccctcgctgtcgacgatgcggtccaccacgtgcggctgcacgaggtagccgccgttcgccacggcgcagatcgccgtgatcatctgcatcggcgtgatcgagaagttctggccgaacgactcggtcgcgagctctacgaggttcaggccgtccacatcgtagtagaggctgtctgcctcgccgggcagatcgacgcccgtgcgctccgtaaagccgaacgcgtcaaaataatcgaagaaggtctgccgcccgagcttctgcccaagccagatcatgtacgggttgcaggagttgcagatgccgtccgcaaacgtctccgtgccgtggccgctgtggttccagcagctgatcgggtcgatgccgttgccgaaatcccactcgcccgtgcaggtgtacgtggtatcctcggtgacgatgccctcctcgagcgccatcgagccggtgatcatcttaaagacagagccggggtagtacgtatcgctgacggccttgtttcgccactgcttgttctgcgccgcggcgtaggcctcgtcctccagcgtcacccgcagctcggcgaggtcctcgctcgtcaggcggtcgtaatccgagagcgcctgctgcgcctccttcagctcctcctccgtctccgcggcgtccacggcgagctgtaaggtgttgagctcctgctcctccttatactgcgcggccttgatctcctcctcgaccgtttcggggatcttcgcctcggcctcctcggagatcgtgaacgggtcattcgggtcgtagtcgccctttgtagaaagcgcgatgatcgcgcccgtttttacattcatcacgacggccgtgccgccctcgagcgcgccccacatctcgaggccctctgcaagatgcttttccacgatgctctgcaccgtttcgtcgatcgtgagcaccagattatagccgtcggtcgcctcgatatactggtcgtactggaacggcatgtcggtgccgatcgcattcttggcgctcaccatgcggcccgccgtgccggaaagcacctcgtcgtactccgtttcaatgcccgcaaggccctgattatccgtgcccgtgaagccaagcaccgtggaggccgtcgtgccgtacgggtagtaccgcttgtagtcctcctgcaggatgatgccgcgcccgatctccatctcgtcgatcgccgcgttgatctcatcgcgcagctccgtttccaccttgcgcttcacatagacgaaataactctgctggtgcgtcttttcgagcacgtcgtcgtaattgaggccgaggatctcggagagacaggtggcgattttcacgtcgtcgccgtcctccgtatcgatataattcggctcgatcgccaccgtccagacgctcgcgctctgcgccagcaccttctgcccggtcgcgtcgtagatcgtgccgcgcatcggcgtcagcacggtggattgcaggctctgatccacggcgctcgccttcagctcctcgccgcggatgatctgccagcggacaaggtttaaaaccacgacgccgaagcccagaaaaatcaatatgctcgttatgagaaccgttctcttccacattttggcgttattggagccagccattcgccgtcccttcctttcccgtgccgcggtgcggctgctttttgcaggcagacgacaaaagcgccgtataccgaaaaatgagagtcaagatcaactctcaactctcctcctgaaaattcccccaccgggaaccgcataactcatttctattccggaatgcgccgcattatgagaagatcgacaggatcgattcccagatttgtgtgaagatattgggcgaggtgtttttctgcacaaccgtgcccgcatcctcctgcgcaaggctgatgtaggtggtctggccctctgcggccttctccataccgagcgtctcgcgcgcgtacgcttcaatttcgtccgtattcattttggccgccgcctgcatctcgagctgtaccgcaatgctctcctgctcggctaaggccgtcgtcgtcgtgttgatttggtcggtgagctccgtgagctgcacctggctgaatacgatcgcgccgattgcgccgaccacaaccagaacgaggcagagattcaccatcgttttgagggaatgcgcgttgtgccggtggctgcggcgaagctgcttctcgttcagccgaatgacattggattttttctttttggcgggcgcctgcggggcaggtgctgccgctgcggagcgcgtttcaaacaggctgtaatcgtatgcgctcgaagtgtttgccattcccgtatcctcctttttcgtcttgctatttacagcatttgtgctatacttctgtataagcgatcttttcgatcacgcggagccgtgcgctgcgcgcgcgcggattctcgctgagctccgcctcacccggtgcgagcccctttttgtagagcagccggccctgcggctttttgccgcacacgcagaccggaaaatccttcgggcaggtgcagcccgtgcaccacgcgttcatctgctgcttgacgatgcggtcctcgagcgaatggaacgtgatgaccgccagccggccgccgggttttaaaagcccaaaggccgccgcaaggccgcttctcagcgcatcgagctcgccgttgacggcgatgcgcagcgcctgaaacgtgcgccgggccgggtggccctccgcgcggcggactgccgccggcatgctttcccgcacgatctccgcaagctctgccgtcgtttcgatcggctttcgctcgcgggcggccgcgataccctttgcaatgcgcgccgcgctcttatcctcgccgtagcggctgatgatctcggcgagctgctgccaggacagcgtgttgacgaggtcggccgccgaggtaccgctcttgctcatgcgcatatcgagcggcgcgtcactgtgataggagaagccgcgctccgccgtgtcgagctgaaaggacgacacgccgatgtcgagcagaacaccgtccgcggcaaaaatgccgttttcggccgcgatgcggtccatctcggaaaaattccccatcgcaacgatggagccggggtatttggaaagccgcgcccgcacgactgcgatcgcgtccggatcgcggtcgatcgagaggagcttccccgttgtgaggcgctcgaggatggcgccggaatgcccgccgccgcccgcagtgccgtctatatagatgccctccggctgaatgccgagggactcgatcgtctcctcgaacaaaaccggcttgtggttgaaaataatttcctgcataatcagatattgagagcctgcatgtcgctgcggagctgctcgctcgacatggattcgttaaaggcgttccagcgctcgctgtcccagatctccgccgtggcgccgacgccgatcacggtcacgtccttcgtgaggccggcatggcggcgcagcgtggggctgatgaggatgcgcccctgcttgtccggcgtaacctgatccgtcgtcgcgtagaggctgcggcggatgtactgggtctgcgaatcgggcagctcgttgatcttcgcgacgcgcagctgccactgctcctcggagtagagggtcaggcagccgtcgagccctttcgagacataaaatgtctcgccgagctcctcgcggtagcgcgacgggatcgtcacgcggcccttcgcatccatgttgtgctggtattcgcccatcagcatacggcttccatccccctttcccggcgcttttggccgcacaaacaggcttcgttcaccccaaccctgtccgttttgccactcggcgccacagtttgccactcaatgggtacattatatcgtatcgggcgcttaaaatcaacccaaaatctaaaattatgtttactgcgttcgatccgcccgccggatagattgtgctgccgcgcgccaaaatttcattcaagcactacatcttgtgcccgccgccgcattcgcggagtcccccttaaaaaaccattcatagaaagtttacattttgtgcagctcataccgaactgaaagacattttttgacaaaattacggcctcctgccgcagatcacactgcggcaggaggccgttgacggtactctatgaaaaatcaggcgagcggggcgagaatccgcctgtccgcccgccgataaagatacagggcaaacggaacagcaagcagctccgccaagacaaaggccgtccacagcagcgcgagcccgccgatttcagacagcacaccgacgagaagcagcggcagcgccacctgccgcagcagcatcaggtacatgctgtacatgccgaggccgagcgcctgaaacaccgtgccaagcacaaggccgggcacagacacagcatagctcagcgcaagccagcgcaccgcgggaacgcccaccgccagcatagaggctgaagcatcaaaaaagccgagaatccagcccggcagcagctcgagcaccgcaaagggcacggccacaaacaaggcggaatacagcagcgcccagcggatgctctcgtagatccgaccgcgccgggccgcaccgtagttgtatgcgacaacgggaatcagcccattattgacgccgtgcatgccgatgagcgcgatgctctgcatgcgggcgcatacgccgtacactgcaacagccgtggaggaaaagccctgcaaaaccgtgttcacaaaaacacccgtaacggaaacgacgccctgcatcagcgcagttgggacgccgacacgcagaatttcagcaatatgcacccaccgtacacgcagcgtaaagcggatcgggatctccgggttcatgcgcagattgacgataacgccggccgcagcgccgaggcactggccgatcacggtggcatacgccgcgcccgccgtacccattgccggcaggccaaagccgccgaaaatcaagattggatcgaggatcaggtttgtaaccgacgccgtggaaagcgtaacaaggaacagcataggcctgccggtcgcaatgaggaagcggtcaaagacccactgcgccatttggccaaaggagaacagcatgcagacttgcagataatccaccccataggcggcgatttccggctgcccggccgcctgccacgcaaaatacgggcgcaccccgagcacacaggccagcgcaatcaacaggtaggcgcctatggaaagcagcatggccgcagatgctgtttcgcgcactttttcacggttgtgctctcccatcgcctttgaaatcgccgcattcaggccaacggcaacaccgcagcccagcgcagacatgatggtctgcaccggcgcggcaagcgaaagcgcggtgagcgccgcctcatttacgcgcgaaacgaaaatgctgtccaccacgttgtaaagcgaattgacgagcagggaaagcatcagcggaaccgctgtgccaagcagcaggcgcggcacgggctgggttcccatgcggttttccttttgttccataaagcacgagtctcctttgctgtttcgttgcccttattgtatcaaggctggttttaaatagcaaatacctattttcaatttctatccatagtcaaaaagcataggagtttgttaaaaatataaggatccccggtttgctctgcgcgccggagatcctgctgtgcctattatttcaagatattttactgctcgttcgtctgctgtgcggtctgctgcgcggatttcagcgactggcgggtctttctgagctcggccagcgccgtggtcatcgactcgtcggtgcggcgcatgaggtcctccacgtaatcgttcgaggccttgcgcatgtcgcggaacttgacctgcgcctgcgccataatgtcgttcgccttcgcctgcgcctgccggacgatctcctcctgattgacgagcgttttcgccttttcctcggcgacgcgcacgatcgtctccgcctcgcgctgcgcctcgctgatgatctgcgcgcggtccgcgacaatcgccttcgccttgcgcacctcagccgggatcgcctcacggatctcgtcgagaatctgccttgcctcctcggtatcgataaaggatttgccgccggagagcggaaggctccagcccttctccagaacgtcgtaaagctcgtcgatcaaatcttcaactgctgcctgattgttgctcatggtatccattcctttctcattcagccgatgcgcttagctgcgcgccgtgcggcataatctttcattgattctctcgagcaggcacgccggcacaaaatgcgaaatatcgccgccgaagccggccacctgcttgacaaggctggagcttaaaaacatgttctccacacgcgtgggcaggaacatcgtctccacctcggggttgagctgcttatttgcgagcgccatctgaaactcgtactcgtagtccgaaacggcgcgcaggcccttgataatcgcgacggcgcccttctcgcgggcgtaatcggcgagcaggccgctcacgctgtccacctccacgcccatgcccgcggtcactgtccgcagcatgtccatgcgctcctccacggagaagctgaagtgcttttcgggattgatcggcaccgccacaatcaccttgtcaaatatcttgcacgcccgggtgatgatgtccatatgccccagcgtgaccgggtcaaagctgcccgggcagattccaattctcatgttgaatcctcttctccgccgctcaagccatgctttcgtggcggtaagcggtcagcagaatttttccgtatcggtattcgcgcgtgcgcacgaatccgccagccgcgtccggcagtacttcgtccgcagggtgctcgcagatcacgatgccgccgcggctcatctgcggcgcgaccgccgaaagcgccttttccaaaatgccggtgcggtaaggcgggtcgagaaacgcgatgtcaaacggcccggcgccgcgcagaagaaaggcggcgtaatcggcgttgacgatctgtgcctgctcttcaaagccggtcgttttcacattctccgcaacgactgcgcaggacgccttcgcctgatcgacgaacacggcgcgcgccgcgccgcggctcagcgcctcaagcccgatttggccggagccggcaaacaggtcgagaaacacgcggccctccacgtcaaattgcaggatgttgaacagcgcttccttgatgcggtccggcgtgggccgcacggcctgcccctccagcgtcctgagctttctgccccggcgggagccggtaataattcgcaagcgggaacaactcctttcgatttaacaaactgattatcccattattcaaagaatatgtcaaccgtttttgccgagaaaagccgaaaaaagcggaaatcaatccgtttttcgccgaatttccgccatcattctgcgtcgtgctccggcaccgcctccgggtggaaatagccgtacaccgcgcgcgcagccggcgcgttcatgcccggcgtttcctcaagcatctcgaccgttgcctcgctgacggcgcgcacggtgcggaaatgcttcatcagcgcccgggcgcgcgtctcgccgatgcccgggatgccggtcagcgtcgtggaaatcgtattttttttccgctgctggcggtggtagccgatcgcaaagcggtgcacctcatcctgaatcgtcgagatcagcgtgaaggccgcgcggttcgagttgatcgcgatctcgccgccgtcctcggcgatcgcgcgcgtgcggtgcttgtcgtccttgaccatgccgtacaccggcacgtcgatgcccatctgccgcagcagcgggcgcaccgcggctacgtgccccttgccgccgtcgagcagaatcaggtccggcaggcggccgaagccctcgggggcttcggcgcggcggtactcctcaaagcgccggccgataacctcgcgcatgctgccgtagtcgtcctgcccctcgacggtcttgatcttgaacttgcggtaggcgtttttcagcgggcggccgttttcaaagacgatcatgcccgccacattttcgccgcccgcgaggttcgaaatatcgtaggactcaatgtattccggcgttttctgcaaattcagcagcttgcgcagctcatcgagcgccgaggtctcgcgcccggtggtgcgccccgtcgcctgcgcgagcgcctcggccgcgtttgtgcggcacatttccacgagctgcttctgctcgcccttctgcggaatgtgcagcttcacgcgccgcccggccttcttcgtgagccattcggcgatgacctccgcatcgttgaccgcgccgtcgagcgtgacgaccggcgggatcttgtcgcggatcgcgtaatactgcgttaaaaactcgctgcggatctgctcggggtcgctgtcgccgttcaggatgaacgactcgcggtcgtagagccggccgcccgaaaagcggaatacctgcacgctcaccttttcgccgccgagcaccagcgcgaaaacgtcctgctcggggatgcggctcgcaacgaccttctggcgctccttgagcttatttatagccgcaatgcggtcgcgtatgcgcgcggcaagctcaaattccatgttttccgcggcctcgttcatcttttccgtgagcgcgcgcaccgaatcactcgcgccgccgcggataaaatcgagcgcgtcctgcacggcctcggcgtactccttctggctcacatgcccgcggcacggcgcgcagcactgcttgatgtagtagttcaggcacggccgcccccggccgaaatcctgcgggaatttccgcgagcaggagggcaggcggaagattttccgcgcctcctccaccgtgtccttgatcgtccacgcggagaggtacggcccgatgtacttcgcgccgtcgtcgagcacctgcttcgtttccgaaatgcgcggccagtcgccggccgtcaccttgatgtagctgtagcccttgtcgtccttcaaaaggatgttgtacttcggctggtgctgcttgatgaggctgctctcgagaatcagcgcctcaaactcgctgtccgtcaaaatatactcgaaatattcgacgtttgagaccatgcggcgcaccttttcgtcatggttcttctccgaaccgaaatactggctgacgcggtttttgagcgccttggccttgccaatgtagatgatcgtaccgtccttatcgtgcataatgtagacgcccgggtgcagcggcagcttcatcgccctgcggcgcagctcccggatatgctgtttcttttcttctgtgagtaaaaccatctgccgccgcctttcttttgcgccctgcgccgaaaaaatgctccgccgtatataaagaaacgcctaccggaatgctccgataggcgccgttcgtgccggtaaaacttattctgcaaaacccgattccacaagagcgaccaggctgtcgacagcctcctgctcgtcggaaccatcggcgatgatgtcgatcttcgtgccgccgacaatgccgagggacagaacaccgagaaggctcttggcattgacacggcgctcttccttctcaacccaaatggacgatttgaactcgtttgccttctggatgaagaacgtggccggtctggcgtggagacctacctgattctgcaccataacttccttaacacacatgcgattcactctcctggtagtaatcagtaaattctggatttcttatgaaaaaataatggggtctcaaccctcacgcgtcttattatagcataatttgtctgcccgtcaagcgtgcaggcccatttttggatacatgccagttgcgcctcccgctttcgccggacccctttgtgcagtttgcaccgtttgttgaaaacatttcgtcgctttatcctttgcaggcggacaaaagccgtcgaaacgcgtctacttttgctctaaaagcatcttatcctcccgggtcagggcatggcgctgaaagagatcggggcgggcctcccgcgtgcgcagaagcgactgcacgcgacgccattttcgtatattttcatggtgcccgctcatgagcgcctcgggcacggcgcgtccccgccagacggatgggcgggtgtactgcgggtattcgagcaggccgtcaaaatggctctcctcctcgaaacagacgtcctcggaaagtacgcccggcagcatgcgcgccacggcgtccgtgaggatgacggccggcagctcgccgccggtcagcacgaaatcgccgatggaaacctcttccacatcgtatgcctcgagtacgcgctcatccacgccctcgtagtggccgcagaggatcagaagattctcgtgcgcggcgagcgccttcaccttttcctgattcagaacgcggccgcggggggacatatacacaatatgcggccgcacgccggtgtgttcggcgaccgcctcaaaagccgaggcgaccggctcggccatcagcagcatgcccttgccgccgccgaaggtgcagtcgtccacgcgcttgtgcgcgccctcgccccagcgccggagctggtggcagcacacctgcaaatggccgcgcgccctagcgcgcccgataatgctctcgccgagcagcgtctcgcacatctccggaaaaagcgtgacaatatcaatccgcatcggcgccgtccccctctgtggtaattgtttccgcttctccgccgaatataccgggaatcgggcgcacaaacaactttccgccgtccacatccgttttggcaatcatctcatcgaccgccgggaacaggtactccgccccatttgcgccggcgatgcggtagacgttgttcgcgcccgtttcaaatacctcctgcaccgtgccgtacaccgcaccggtcgcgtcgtcgatgacggagaggccgatcagatcgctgataaaatagcggtttttcggcaggcgcacgtcgttccggtcgaggtacagcacgcgcccgcggtagaggtcggcctcggtcgcgctctccacgcccgccagacggacgagcaggaggctcttgtgcacgcgggaagcgatgaggcccgcgtcggtgcggccctcgtcaaagtagagccgcttgagttttttgaggaattcggcggaatcgcaccacggctccacgcgcatttccccgcgcacgccgtgtgtgccgacgatccgcccggcctcgagaaactgttttttcataataccaaccattccttttcgatctgtgtcgattgcggcgtgcggcagcctactgcgcagaaaacgccggtgggcgccgtctttccggcgcggcgttttttccacaggctgcgccgcacgcggttcaaaaccggcagggcagcaaaaaaggcgcgcgggaggcccgtgcgcccttgcggtcagtcgatttcgacgataaccttttcattgctccgcgtggcggcggcgcgcatgacgacgcggatcgccttcgcaatgcgcccctgcttgccgattacccggcccatatccgcctcggcaacgtggaggtggtagacgacggagccgtcctcccggggctcgtccatcgtgaccgaaacgtcctccggctgctcgacgaggccctgcgcaatgattttcaaaagttcctgcatttcgattttcctttctcagaaagcgagcgaggccaatcagattacgccgtgcttcttgaacagcgccttgacggtatctgtcggctgtgcgcccttctccatccaagccttcgccttctccgggtcaaccttcacgacgctcggctcctccatcgggttgtagtagccgatctcctcgatgaagcggccgtctctcgggtagcgggaatccgccacaacgatgcggtaaaacggagccttcttggcgcccattctgcgaagtctgatcttaaccatgataaattcctccaaagtttatttgaaatataatttttatctattaaccaacggaacgtcggcaatattcagtcttaaaacggcgggaacccgcccatgtccgggccgccgaagccgcccatcccgcccatgcgggacatcatctttttgcccttcttgccgccgaactgcttcatcagcttctgcatctgccgcagctggttgcacaggcggttgacgtcctccaccttcatgccgcagccggcggcgatgcgccgcttgcgggaggcctgcaaaagctcgggcttcgcgcgctcctcgggcgtcatcgagaggatgatcgccgcgttgcggtccatgatccggtcgtcgatgtccatctcgtcgagcttcgcgctgttcacgcccggcagcttcgaaaggatgcccttgagcgggcccatcttcttcacctgctgaaactgctcgagcaggtcgttgaaatccatcttgttctgcatcatgcgctcggcggtacgggccgcggccttttcgtcgatgcgcgcctcggcctgttcgatgagcgagagcacgtcgcccataccgaggatgcggttcgccatgcggtccgggtggaaaacctcgaggtcgtcgagcttttcgccggtgcccgcaaatttgatcggcttgccggtgaccgccttgacggagagcgccgcgccgccgcgggtgtcgccgtcgagctttgtcaggatcacgccggtgatgtcgagcaggtcgtcgaacgcctttgcgacgttcacggcctcctgaccggtcattgcatcgacgacgagcaggatgtccgtcggatggacagcctcgcggatgtttttcagctcgttcatcagcgcctcgtcaatctgcaaacggccagccgtatcgatgatgacgtagtcgttgccgtagtcgcgtgcgtggcgcacggcggcctcggcgattttcaccgggttttcggcgcccatctcaaacaccgagacgcccgcctgcccgccgacgacctgaagctgcttgatcgcggccgggcggtagatgtcgcccgcaacgagcagcggccggctgccgcggctcttgagcatcttcgcgagcttcgccgcgtgcgtcgtcttaccggcgccctgcaaaccgcacatcatgatgacggccggcgggtgcgcgggcattttcagccgctcctcgctgccgcccatcagcgcggtcagctcctcgttgacgatcttgatgaccatctgcgcgggcgtcaggctctccatcacatcctcgccgatggcgcgctccgtgacgcgctttgtgaagtccttcgcaaccttgtagttgacgtcggcctcgagcagggcgaggcgcacctcgcgcatggcctccttgacgtcggcctcggagagcttgcccttgtttttcagttttttaaacgcattgccgagcttgtcggcaagaccttcaaacgccatgtaaaatccttcccggccgaaacggcactcagtctaccagttccttggcggaagcgaggatcgcctccacgttttggcggatgaccgggtcaccgccgtttttctcgttctgcgcttcgatctgcaaggcgcggtcgcagatggaggtcagctcctcctgcaccttgtggaagcgctttgcaaggccgagccgctcctccatttcaagaagctgcagctccgcgcgcttgattgcgtcgcgcacgccctgccgcgtgatgcctttcacctcagcgatttccgcgagggaaaggtcctcgttatagtagcactccacaacctcccgctgcttgtcggtgagcatgtcgccgtaaaagtcgaggaggaaggtgatgtgcagatccttcgccatagtcgtctccaatccgggcgcggcatctcccgcgcctctctgtaaagcttttttctttacagcctttgtattatacaatagccgggcgggattgtcaagggaaagatttctgtattttcgcatcgttctatctcggataaaattgtcaccattcgagatatttccgcctcttttcctctacttctgttagaataaagacaccgtcccaaatgcggcaaatcatattatacgaggagggcttcccatgttacttccacggctacgcgacctacggcaagattccgacctcacacaggagcaggtagcacacacgctgttcatctgtcggaatgcctatgggaaatataagcgcggagaagcccacattccgctcgaatctctggtggcactggcgcgttattaccgcgtttccaccgattatcttcttggcctgacggacgtccccgcgccgtatcccccaaaagcgaaaaagaaataacccgtgcgcccgcctttacaaaccggcgggcgcatgctatattggacatactatattatattggtatgcaaaataaaggggcgaaaaccatgatctatttcaactgcgactacaccgagggctgccacccgaagattctcgagcggctttcggaaacgaaccgcctgcaaacgccgggctacagcgaggacgcgatctgcgcctcggcgcgcgcgaagatccgcgccgcctgcgggcgcgaggacgtcgacgtgcacttccttgtcggcggcacgcaggcgaacgcgacggtgatcgccgccgcgctgcgcccgcatcagggcgcgctctgcgccgagaccgggcacatcaacgtgcacgagaccggcgcggtggaggccaccgggcacaaggccctgccgctgcccgccacagcggacgggaagatcaccgcagaacaggtcgaggccgcctataaagcccatgtgaacgacgcttccttcgagcacatggtgcagccgaagatggtgtacatctcccagccgaccgaaaacggcgggctgtactcgaaagcggagctcaccgccctgcacgaggtttgcgcgcgctgcgggctgtacctctttgtcgacggcgcgcgcctcggctacgggcttgcggcgccgaaaaacgacgtctcgctccacgacctgtgcgcgctgtgcgacgttttctacatcggcggcacgaaggtcggcgcactgttcggcgaggccgtcgtcctcgtgaacccggcgctcaagcccgatttccgctaccacgtgaagcagcgcggcggcatgctcgccaagggccgcctgctcggcgttcagttcgacgtgctgttcaccggcggcctgtattttgagatcgccgaaagggccgtgcggcaggcgctgcgcatcgccgaagcgtgccgggcggcgggctgcacgttcttcgccgattccccgacgaaccagcagtttcccatttttccgaacgccgcgctcgagaagctcggggagaaatacgtctggtcgcactgggcgcgcgtcgatgacgcgcacaccgcggtgcgcctgtgcacgagctgggcgacaaccgacgaaaacgtcagcgcgctctgcgccgacatcgcggccgccatgcggtgatccccggcgcacgcccgcgccgctttaggccgggccattcaggccggccggagccgcggcgagcaaagcggcaatcggcttcgccgaccggcacaaaaaataaggaatggtgatttttatggattaccggatcgccgtctgcgacgactgcgccgcggacgcggatttcgccgccctgtgcgccgcagaatgggcgcaccgcctcgggcacacggcggaactgctgcgcttcccctcggcggaggcctttctctttcactatgcggaggacaagcggtgcgacatcctgctgctcgacgtcgaaatgcccgggctgagcggcgtggagctcgcaaagcgcatccgagaggaaaacgacgcactgcagatcgttttcatcaccgggtacaccgattacatcgccgagggctacgacgtttcggcgctgcactacctcgtgaagcccgtcagccgcgaaaagctctgcgccgtgctcgaccgcgcggcgcagcggctgaaaagcgccgagcgcgtcttgctgctcgagctgccgggcgaaaccgtgcgcgtgccgctgtacgcgatcgactacctcgaggtgcggcagaattacgtgaccgtgcatgccgacaaggaatacacggtcaaaaaaacgcttggcgcgatggagagcgcgctcgacgaccgctttttccgcgccgggcgctcgtacatcctgaatctcagccgcgtgcgcagcgtgacgaaaaacgaggtgctgctcgtgaacggggtgcgcatcccgctgccgcgcggcatgtacgagccgctgaaccgcgcgatcatccagaaaatgtaaggggaggcgcagccatggctttcttttccagacggctggaccggcgcatcgccgcctaccagcacgagctgctcgaaacgcactaccgcgaggtggaaaacatgtaccgcgaaatgcgcggctggcggcacgactaccgcaaccacatccagctcttaaagacatacgcgcacagcggcgacctcggcgcggtcagcgcctatctcgacaagctcgaaaccgacctcacgcgcgtggacaccgtcgtcaagaccggcaaccgcatggcggacgcgattttgaacagcaagatctcgcttgcgaaatcgaagggcatcccggtgcgggccgacgcgcacatccccgtcgcgcttgccgtctccgacctcgacctgtgcgtcatcctcggcaatctctttgacaacgcgatcgaggcgagcctccgcctgccggaggcggagcggatgatccgcgtctacatggacacaaagggcacgcagctctatatttcttttacgaatctcgcggcgggcgggaaacagaaaaaggaaaacggccgcttccgcacgacgaagggcgcggggcacggcttcgggctcttccgcatcgacagcgtggtggagcgcctcggcggctacatccgccgggcgagcgaggccggcgcgttcacgaccgagatcctgctaccgcaggccgacgcgcagttcgtccccaaaacgtaacgattcgtccccggaatgcgccgggggcgtttttttgctgtatgctggaggcagaaccccagaaaaggagaaatcaccgtgaaagagacaaaaaagacgcggccccgatacaacatggcgcagaacgccgggtacatgatcgcgctcgcgtggcgggaggaaaagagcgtactgtggctctgcctgctgctcgccgcgctgcacgtcgcgatcagcgtgaccgagcttttcctcgcgccggccgtgctcgggcaggtggaagccgcggcgccgctgcccgtgctgctcggcacgatcgccgcgttcaccgccgggcttcttctgctgcgcggcctgcaggcgtatacaaacgaaaacaccggcttcggccgcatctcgctgcgcctgtacctctgcatgcagatcagcttcaaaacgctcacgacctcgtacccgaacctcgacgatcaggcgctgctcaaggaacgcgagaaaagccatatggccacaaacagcaacttttcttccagcgaagccatctggcggacgctgacggagcttcttcagaattccgccggcttcctgatctatttgatcctgttcctctcgctcgaccccgtgctgattctgatcgtccttgcgaccgcggcactcagctacctcgcatcgacgcgcgccgcaaaatggagcttcaaccggcgcgaggaggaggccagcttttcccagcacatggattatgtcgattccaaagccagcggccacgcgatgctcaaggatatccgcatcttcggcatggggcgctggctgcgcgacgtttacaccgccgcgatgcgcatgttccggcactttttgttccgccagcagcgcgtttactttctgagcgacctcgcggacgtcgcgctgacctttctgcgcagcggcgcttcctacgcctacctgctgtttttgacgctgcaaaacggcctctccgcctctgaatttctgctgtacttcacggcggtcggcggcttcacgacttggatatccggcattctctcgggttttgccgagctgcaccgcttcagtctggaaatcaacagcatccgcgcctatttggaggcgccggagccgttccgctttgaggacggcgagccgctcgagcccgaccccgaaaagccgtacacgatcgagctgcaaaacgtctcgttccgctaccccggcgcggaaaaggacacgctgcaaaacgtcagcctcaaggtaacgcccggcgaaaagctcgcggtcgtcggcctgaacggcgccggcaagacgacgctgatcaagctgatctgcggcttttatgacccgaccgagggcgccgtgctgctgaacggcgaggacatccgaaaatacaaccgccgcgactattaccgccatttttccgccgtgtttcaggatttttcgatctacgaaaccacgctttcggacaatgtgacgcagacgccgggcagcacagaccgcgccggcatggagcgcgcgctggaaagggccggcctgctggagcgctgccgcgcgctgccgcacggcggcgaaacgcacatcggccgcacgctctacgaggacggcatccagctttcgggcggcgagatgcagcgcctgatgctggcccgcgcgctctacaaggacgcgccggtcatcgtgctcgacgagccgaccgccgcgctcgacccgatcgccgagcacgagctctacctgcactacagcgcgacgaccgccgggcgcaccgccttctacatctcgcaccgcctcgcctccacgcggttctgcgaccgcatcctgttcctcgaaaacgggcggatcgcggaggcgggcacgtacgaatccctgctcgcgcagggcggccgctacgccgagctgttcgaagtgcagagccgctattaccgggaaggggaggtttgtttcaatgaaaacgaagaaggatgaagccgccgcaggcttccgggaaacgttgcacgccacatgccgcgcctataagatttggcaccggtatgcgccgaagctgctgctctccaccgcactgtacagcgccttttctgcgctcgcaccgtatgtgccgatctacttctcggcgcagatcttaaacgagcttgccggcgcgcgcagccctgagcgcctgacagagctcgtgatgctgacgatcgccgtgaccgccgcgcttgccgccgtaaccgcgctgctgcggcgctggaaggagattcatgagcacaccgtctatcacagcaacctatttatccaaatcgataagatgctttcgatggattttcaggcggccgacgcgccgcagacgcacacgctcctctctcagatctggcagaacacgaactggttcggtcacggcctgatactcccgatctggtatctcgaaaagctgatccagcctgttttcggcattctgggcgccgccgcactttccgtgacgctcttcaccgagccggtgcccgcatcggccggcgcgttcgccgcgctcaacaatccgctcatcaccgcgctggcgctgctgcttctgctcggcgtcagcttcctctcccccgtttttcgaaccaagagcgccatgtgggtcgcccgaagcacaggcagcgccaaggaaaccaaccgtttctttatcttcaacatcaccgccatgcgggaccgctgccgtgcgcccgacgcgcgcatctaccggcaggaccgcctgcttctgcactacgcaaacaccgtcaatgaattctgcacgcagggcacctttgccaaatgcgcgcgcggcccgatgggcctgtgggccggcgccgcggcggccgtttcagcggttttcaccggcctcgcctatgcgttcgtctgcctcaaggcgtgggccggcgcgttcgcggtgggcagcgtcgcgcagtatgtcggcgcgatcaccgcgctttccgaaagcgtcggcacgctcgtctccacatggggcgagctccgcgcaaacgcggttttcctgcgccagaccttcaaatttctcgacacgcccaacgagatgtatcagggcagcctgacgaccgaaaagcgcagcgaccggaactacgagatcgaattttgcgacgtgtcgttccgctaccccggcgctgaggactacgccctgcgccatgtttcgatgaaattccgcatcggtgagcggctcgcggtcgtcggcgaaaacggctcgggcaaaacgacgttcatcaagctgctgtgccgcctctacgacccgacggagggcacgattctgctcaacggcatcgacatccgcaagtacgactacgacgagtacatcgcgctgttctcggtcgtgtttcaggatttccagctcctctccttctcgctcggccagaacgtggccaccgccgtgcagtacagccccgagcgcgccaaggcctgcctgcaaaaggccggcttcggagaccgcctttcgcagcttccggacggcctcgaaacgaagctctacaaggatttcgacgaaaacggcgtgcagatctcgggcggcgaggcgcagaaaatcgccctcgcaagagcgctctacaaggacgcgccgttcgtcgtgctcgacgagccgaccgccgcgctcgacccgatcgccgagatggaggtctacgagaaattcaacgagatcgtcggcgacaaaacggccgtctacatcagccaccggctctcctcctgccgcttctgcgacagcatcgccgtgttcgaccgcggcagcatcattcagcgcggcacgcacgaaacgctcgtgcgcgacgccggcggcaagtacgccgcactgtggaacgcgcaggcgcagtattacaccgcgcgctgaagcgcacacaccgccataaaaacagcccgggctgttttttacgaccccgttgacttgtaccttttcacgccgaagcgaaagagcagcaggcacgggacgagcaccagcgcggccgcgagcggcagcagcatcagccacgcggcggacgagcggcccacgagatacaaaagcgggtaatactggaacaaggcaagcggcacgacgaaggtcagaacccacagcacctgttttccgtagaccgaaaacgggtagcggccgaactgccgcgcgccgtacgtgaaaatatcgagaaactggacgctttcggtcgtgaagaacgtgcacgccgccttcaaaagaaacattgcgaaaaacacgacggcgccgcaaacgatcatcagcacgagcgcgagcgccttcggcacggtccacgcgacgccgctcgccggcaccgcccagcacagcacgacggccgcctgcaccagcaggccgagccgcgtaaaatcaaaattcggcacgagtatctgcaagagcaccggccgcgggcgcacgagcgcgcggtcgaacgagccgtcgcccaaaatgcgcgaaaacgcggcgagcccgccgccgaacagctcgccgaccgaaaacgccgagacgacgaccgcaaagcagaggaacacctgcccgtaggtgaaaccgtcgaccgcgtcgatccgctcaaaaatgaacgcaaggctgaaaaaggacgcgaaggccgtcagaaactgcccgagcaccgtcatgaaaaacgacatgcggtactgcatctggcttttgagattcatcagaaaaagattccaatagagcttcatcgcttaccctccctgcacaacgacgcgcttcagcgacacgcacatgcacagcttgcccagcgcgacgagcgccgcaagccagaacacctgcgcgagaagccccgcccacagcgccgcgccggaaagcgtgccgcagtagatacgcaacgggatgtcgcgcatcgccgcaaacggcagccactgcacgacgccgcgcacggcgtccggaaaaaatgccagagggatcaggccgccggaaagcaaactcgtcaccgccgtgaaaatgacgcgcgtaccgcggtgcgaaagcgtgaaaaacatggagatgtgcatcagcgtggagatcgacaccgtcacgaaaagccccagcacggccgatatgaggaacagaagaagctgcgcggcactgccgggcagaagcaggcggtatggctcgggcagcaaaagcgcgatgagcagcatcggcagaaagcccgtgcacagcggcgccacgcggttgcccgccgccgaaaacagccagcgcgtgtagaggtccgccgggcgcaccagttcgtacgcaatgccgccggagcggatcgaatcgtaaatatcctcgtcgccgcacacaaccgaaaacaccgtataaagcgcctgctgcatccacatatacgccgccgtctgcggaaaggtcatcgaaaaatccgcgtcgcccgccgcatacaccgccgaaaaggcgaggatctcgaaaaacgcccagaaaaagcgcgcgaagatcgcgccgagcgcgacggcgcggtactgcaggccgttgatcagccggatacggaaaatagaaagatacgttttcatatgcggtactccctgtaaagcgccgcgaccatctcctccgccgtgatctcggagaccgtgacgtcggtcagcgcggcgccggcggcaaggtgcgcgacggcgtcggaagccgtgagcaccgcggggtcaagcgaaagctccagctcgcccgcgcggcaggccgtcagtgtgaggccggggcacagcgcgggcgccgccccgccgaagcggacgacgattttcttcttcccggagacgcgccgccgcagcgtgtcgaggctgccgtccagcagaagctgccctttgccgatcaaaagcacgcgggaggcgagcgcttcaatatcctgcatgtcgtgcgtcgtcagcacaacggtcgtgccgcgctcccggttctgctcgcggatgaaccggcgcacctcgagctttgacgcggcatccagcccgatcgtcggctcgtcgaggaatatggttttcgggtcgtgcagcagcgaggccgcgatctcgcaccgcatccgctggccaaggctcagcgtccgcgccggggctttcagcagctcgccgaggccgagcagcgccgcgagcgcgtcgagatttcttttgtaccgcgccggctccacccggtacatgtcgcgcagcagctcaaaactgtcgatgaccggcacatcccaccaaagctggctgcgctggccgaacacgacgccgatttcccgcgtgtgggcggtgcgctcccgccacgggacgcgcccgttgacgaggcagcgcccgctgtccggcgtcaggatgccgcacatgatcttaaccgtcgtgctctttcccgcgccgtttgggccgatgtagccgacgatctcgccgtccccgaccgtgaagctcacatcgcaaagcgcctgaatcgtctcgtgctcccgggagaacagcgccttgacggcgctgccgaagcccgcctgccgcttcatcacgcggtaggtctttgtcacattctgaaattcgatcacggtttcccctcccttgctgaatccatcgtattttcccgaaattagggagatcattttaccgtatttccgcacaaaaatcaacagaaatgcaaaattttatgtgttttccgctgtattttggcagttcacgctttctgcgcggtttttgccgccccgcacggaaaaaggaggcccgccggaatccccggcaggcctccccgtcacccgagcggcttgataaagcgaagctgggctttttcttctgtataaccgttttgccggtagaaatcgtgcgcgccggcgcgcgtcatgccggaattcagccggataaaacgcacgcctgtctcccgcgcccaattttcgacggcgccgagcagcgccgtaccgatcccccgccggcggcagtccgccgaaacggcgaggccgagcacgtttttcatcgtgtcgcaatacagcacgtcgtagtcagcggcgtggatgtatcccgcaactgcgccgccgctttcggcgatgaacacgcgctcgcgcgggtttttaagcgccgcccggagcttttgcagcacgagcgccgccgtgcagtcgtagccgagcgcttctcggctgaggcgggcaatcgcctcagcgtcctgcgggcgggcggggcggatctcaaagccctccaccgcgcgtcagcccttgaaggccccgagcaggccggcgtctctcgtgtagaccgggatcacggtcagcggcgcgtcggcctcaaccgtccggccgccctcgaccgcctcgccggtccacgcgttgtaccacgtgcccgcgggcagatagacggtcttcgtgcgctgcccggcctccatgaccggcgcgacgagcaggctgccgccgaacatgtactggccgtcgagcgtccagcagtttttgtcctcggggaagtcgtagaacatcgggcggatgaccggcgtgcccttttcgtgggcgtcctgcatcaggccggtgatgtacgggcgcaggcgctcgcgcaggaacatgtactttctgcacatctcgtagagtgtttcgccgtaggaccagacctcgttcgggccgccggaggccatgcgtccgccgcccacggtgctcatcggcggcgtatgcggctcacggtcgccgtgcaggcgcatgaccgggcagaacgtaccgtactggaaccagcgcgcgaacacctcgcggaacgcttcgtcgctcgggttgccgccgtggaagccgccgatgtcggtcgtccaccacgggatgcccgcgatgcccatatgcaggcccgcggcgaactggttgcggaagctctcgaagctcgaatggatgtcgcccgaccagacgagcgcgccgtacttctgcgagccggcccacgcgcagcgcaggaggttcaaaatattcttctgccccgccttctccatgccttcaaagaaggtctgggcatagcacttcgggtagatattgccgatctgcacgttcggcccgaggtggtagcggtagttgtcgaaatcgtagtaggagtactccggctcggcctcatccagccagaacacgcgcacgcccttgtcgtagtaattcttcttcacttcattccagacgaattcgcgcgcctcggggttcgtcgcgtcgtagtgaatcgtgtcgtccacgcagtgcagccccaccgggaagccgcgctccacgttgatgagcaggccgcgttcgcgcatctcgtggaaattcgcgcacttgtggtcgacagtcggccagatcgagaccatcagctcgatgcccatttccttcagctcgcggatcatcgcgtccggatcgggccaatactgcgggtcgaagcgccattcgccctcgagcggccagtggaagaaatcgacgacgatgacggagatcggcaggccgcggcgcttatactcgcgcgccacctccaaaagctcctcctgcgtctggtagcgcagcttgcactgccagaagcccatcgcccaatccggcatcatcggcacggtgccggtcacggcggcgtaggactcctcgatttccgccggagtatcgcccgcggtaatccaatagtcgatgacctttgtggaaacagcgcgccacgaggtcacgttcgtgccgaaggtgacggagccgacgcccgggttgttccagaggaagccgtagccgagcgaggagagcacaaacggcacgctcgcctgcgaattgcggtgcgcaagctccagctcgcagcccttgaggttcataagcggctgctggtactggcccatgccgaacagcatttccttcggatcggattcaaaccgcacggtcgccgagaaatcgccgccgagaatcggcctgtgctcgcgggcgtccacgtcgagcgcgctgcacttcggggaggtcacgtcccggcggttgcggacgaattcctccaaaagcagcttgccgttctgattatagaacgtgagcttgcccgcctttgtgaccttcgctgtgattttgccgtttgtgaccgccgcttccttttcgccgaccacgatctcggccgaggcgctgtgcggcgcctcaagcgcccagttttcgggcggcatctggggcatcttcgtcgagcggacgcgcagggcattttcgccccacggctcgatccacagcttttcattgttgtcggtcaccacgaggcggccgtccatttcgcgcagaatcgccatacaaaacttcctttccgttataaaagcctttcatacaatccccggcctgtgccgttttacctaaatcataccgcaaaccggcgtgattttctatagtaatcttttgatattattgcggatttttgcgaaatttaccgcggcttaccgcgcctgatggtatgctatcccaaaacaggatactttcccgcctatttcctgctccccgtgcgcgcacgttcaggctttccggcttcgggacgaacacctcttcatagaaatttgtgcccagccgatagttttcccccgcaaatcgcggtagacagcgcgggccgcgcctgttatactcaaaacaggaatcttttgggaacgggacgggcggcatgcccgttcggaaaggaaggaattgtatgcttacaaaaacgctcgatgcttccatgctgaacatcccccacgacccgcgcgtgctcgcgccgctgtgcaggcggcacggcattgcggcggtcagcgcgacgcgcgctctgcttgaggacccgcgcgccgcgcaggaagccgccgccattttccgggaaaacggcgttgccttcggcctgatgcccatgcccgccgatttttacagctgggagctggacggcggtgcgttcgacgcggctctgaaaacgctcgccctgcacgcggcggctgcggaaaagctcggcatccgccacgcctacaaccacgtgtggtcctccggcccgcgcgcctacgacgagaatttcgattggcacgtgcgccgcgtgcgcgccgtcacaaatattctggaggcgcacggcatccgctacgggctggaatttctcggcccgcacgagcttttgtccatgcaggcgcacccgtttgttcacacgctcgacggcgtgctcgcgatcgcagacgccgcaggcggttatgcgggcgttgtgttcgacactttccactggtactgctcgacaaacggcgaccgcgacacactgctctacatggagcagcacgccgaccgcctcgtgctgctgcacgtcaacgacggtgtgcccggcgtcccctttgaccggcagcgcgacctcgagcgccgcctgccgatggagaccggcgtgatcgattcgcgcgcggtattccgccggctgaacaccaaagactgcggcgcgctgtgcatgatcgagcccttcgagccgggccgcacgcactttcacgcgctcactcctgaagcggccgtccgcgaggccgccgcgcttttcgcgcgcctcggctgaccaaaacgccgcccctgcgcaaaccggcagaggcgcaccgactgtacacggaacagcccaccgacgacatgaccggcgggctgttccgctatttctgcgcctgcgtgccttgggcgcggcggcggtaggcgagcggcgtcatgccgcagcgcgcgccgaacgcccggaaaaatgagcgctggctctcaaagccggattccgccgcaatctctgtcacagagcggtttgtgccggccagcagcgcgcacgcgcagtcgacccggatgctcgcgaggtaggccgaaaagccctgcccgatcttttccgaaaacacgtgcgaaaggtggaaccggctcacgccgagcgcgcgggccagcgcctcgagcgtgagcggctcgcggaaatgcgcggaaacgtactgcgcgatctggtacgtcagctcgctgtaatccgcggcgcggttgcggtgcagcgagagctgcggcagcgcgcgggccagcacgagctgcatcagcgcggagcagaccgcccggtccccgccgccgcgcttctccgccgtcagctcgccgacggcgaacgccacgttcgggtggagcgcctcgggcggcagaaacgggtctgccgggtgccagagcagcagcgtgtcggaaaagccgcccgtcagggagaggtcgcagacgacgagcgcggcgcggctctccttggaaagcgccgtgtagctgtggatctggttcggaaaaatcacggcaaggctgcccggtccgagcgcccgcgtttcgcgccgcaccgtgacgctcgtctcgccggacaggacgaaaaacagctcgagctgcgggtgcaggtgcagcggaaagctgagcccctcggccacgacgctcgtcagcgcatcgtccctcgtctcgaaaaacgcgttcatccgcgcgccccctttcccctctttttgttttatcgcaacatatgtcacaaaaaagctgtcttttggcatgtattttaccacaggcaatgctataatgcaagtaaatccagcggaggaaaggaaagtgttgaaatgacgaagcccgttcgagttgccatgatcggcgtcggcgcgatcagcggcatctatttgcagaatttgacggagaccttccgggaggtcgaactcaccggcgtgtgcgacctgatccccgagcgcgccgaaaccggcgtgcggaaggtacgcgagatggtggaaaacggcgcgaacgccgtgatccccaagatctacaaggatatgtacgaggcgttcagcgaccccgaggtcgaggtcgttctgaacctgacgcggccctacgagcactttgaggtgacgaagcaggcgctgctccacggcaagcacgtctattccgagaagccgctcgccgtcgatatggaggaggcggacgcgctcgtctcgctcgccgaagaaaagggcctgctgctcggcggcgcgccggacacgttcctcggcgccggcatccagaccgcgcggcgcatcatcgacagcggcatgatcggcgacgtaatcggcgcgaactgcgcgatggtctgccacggccacgagacgtggcacccggacccggaattttactacaagcgcggcggcggcccgatgatggacatgggcccgtactacgtgacggcgctcgtgcagctcctcggcgaggcgaaagccgtcatgggcatgacaaagaaatccttcaccgagcgcatcatcacctccagcccgcacgccggcgagacgatcgatgtagacgtggacacccacctgtgcggcaacatcctgttttccagcggcgccgtcgcgcagatcctgacgaccttcgacgtgttctacagcccgcaggcgcaggcgcgctttgaggtgtacggcacgcgcggcacgatcgccgtgcccgacccgaacaccttcggcggcccggtgctgctgctgcgcccggaggaccaggccgcggccccaaagaccgacccggcgcttcagcgcaagaccgtgccgaacatctacgagggttataaggagatcccgctgatgtacgactacgccgagaattcccgagcgctcggcctcgccgacatgtgcaaggcactgcgcaccggccgcggtttccgcgcgaactaccgccagcagcaccacgtgctcgagattctgacgagcttcacaaaatcctcggaaaccggcgcgctcgtgccgctcaaaacccgctacgagcgctcggccccgatgcagaacaacccgctccacggcgtgctcgacagctgaacaccgcgccagagcgataaacagcgcaaatctacagaacaaacccaaacggattgaagaaaggaagaatcaccatgatgaaagtatgctacaccggatggacctggattaagagccacgagcccgaagccgccaaagagcagctcgcgcagtcgttcaaggagtgcaaattcctcggttacgactatgtggaaaacttcgcgttcatccgcgatttctacaaggataaccccgaagagctcgtgcagctgcaaaaggactgcggcgtggagctcgtcaacctctacggccacttcaccttcgacgtggaggagtcgctgcgcatcgcgaaggagcaggtcgatttcctcgcggcggtcggcggcaagtggtacaactgccagaacggcggcttcggcgacgacggcccgagcgagcgcccgacaaacccggagatgatcgacaagatgtgcgcgatcgtcaacgagctcggcgcctacgccaaagagcgcggcgtgaccgtatgcttccacccgcactacggcacctgcgtgttctcgcagagcgacatcgattactttgcggcgcacacaaacccggaggccgtctccctgtgcattgacaccgcgcacacgacgctcgccggcatggaccccgcggcgctgatccgccagtacggcggccgcctcgccttcatgcacctcaaggatgtggacacctacgcgctgaaaagcgccgtcggccccgccaagatgggcacgttccgcgcgctcggccacggcacggtcgatttcccggccgtcaaggcggcgctcgaggaggtcggctacgacggcgtgctctgcgtcgagctcgaccgcccggaggtctgcaacttccactcggccgaggtctcccgcatctatatccgcgacgtgctcggcctgtaattgaaagctgcggttcggcggtaaaacgacaaattgcccggcgctttccaaaaccggaggcgccgggcgttctttttcctgcggccgatcgccgcaaagcgcagcaggtccccgaaaaggggcgttccgcgccttatttcagcagcgccgcctcccactcggccggcttaaagccgacgagcacggtctcgccgtccacaacgatcgggcgcttgacgagcatgccgtccgccgcgagcaggcggagctgctccgcctcgggcatgtccggcaggcggtccttcaggttcatcgatttgtagagcaggccgctcgtgttgaaaaagcgcttgagcggcaggccgctccgcccgtgccagtcggcgagctcctcggcggtcgggttctgctcgacgatatggcggtcctcaaacggcacgccatgctcggcgagccaagcgcgcgcttttttgcaggtggagcacttcgggtattgaataaaaagcatagaaatcaccattccttattttttgtgccggtcggcgaagccgattgccgctttgctcgccgcggcaaagacacaaatcgtgtgtgaaaaagtatttttcacacgaagcctctccttccgttttgaattccgtttcctgtgcttagtgtaccacgaaaagggaggttcctgcaatgttaaatctatgtaaagttttgaaaacacattgacactgccgcgcgcttttcctataatcaaagtaaaaaggaagtaaaacaaaaggcaaaacaagcgagctttgtaaaggaagacagaataatgggcgtttctgcggcaacctccgcgcacgcaacggaataaagcggcacagcccgatctcactcgacgagatcgggccgggccgtttttttgcgcccgcagaacggaaaaaagcgcacgcggccccgtgagcctgcgccgcgcgctccccaaaagcgaagtgctgttttgcaaaacggctcagaaaacaaggaaatggtgatggaaatgcaaatttcagacgtactcggactgctcggcggcctcgcgctcttcctctacggcatgcagatgatgagcgccggccttgaagctgctgcgggcaaccgcatgaagcgcatcctcgagaggcttacctcgaaccgcatcctcggcgtcctcgtcggcgcgggcatcacggcggtaatccagtcctcctcggcgacgaccgttatggtcgtcggcttcgtaaactccggcatgatgacgctcaggcaggccgtttggatcatcatgggcgccaacatcggcaccacggtgaccggccttctgatcgcgctcgacgtgggcgcaatggcgccgctgctcgcctttgtcggcgtggcgttcgtcgtgttcctcaaaaagccgattctgcaccactgggggcagatcatcgccggcctcggcgtcctgttcctcggcatgggcatgatgagcgacgcgatgatgccgctgcgcgaatcgcaggtctttattgacctgatgaccaagatgtcgaacccgctgctcggcattctcgtcggcatggtctttacggcgatcatccagtcctcctcggcctcggtcggcattttgcagacgctcgcggccagcgggctgatcggcctgcacagcgcggccttcatcctcttcggccagaacatcggcacctgcatcacggcggtgctcgccgctatcggcacgagccgcagtgcaaagcgcacgacgatcatccacctgcttttcaacgtgatcggcacggtcatcttcaccacgctgtgcatcctcacgccgctgaccggcctgatcgaatcgctgctgcccgcaacgcctgccggccagatcgccgcgctgcacacaacctttaacatcgtgacgaccttgctgctcctgcccttcggcacgcacctcgccaagattgcggagcgcatcctgcccgaccgcgtttcggacgacgtcaaccagcgccagctcctctatatcaagccggtggacagcacccatgagccgcaccgcatcggcacctcggccatcgcgctgaccggcatcagccgcgagctcaaccgcatggcggagatcgtggaaagcaacgtgcgcgacagcttcctcaccgtgctggacggtacgccgaagcgcctgcccgccgtagaggataccgaggagacgatcgacttcctcaacaaggagatctcgaactacatctcctccgtcatcgtctacgagacgaacgagcgcgattcggcgcgcatcagcgcgttcttcaagatctccggaaacctcgagcgtatcggcgaccacgcaatgaacatcagcgaatacacaaagctgatggaggaaaagaagatcgcgttttccgaggagacgaagaacgagatccggcaaatgcagagcgtcagccaagaggcgatgcagctgatctacccgctcgaatccatcacgacggcgcggcttgagaaaatcgcgcagatggagcagaaaatcgacgatatgactgccgccatgcgccagagccagattcagcgcatgcacgcgggcgcggatgaatccgcggtcatttactccgagctgctcacggacttcgagcgcatcggcgaccatatcctcaatatcggcgaggccatgacgcagatttccacaccggaatacagcgccgttgaagaataaacaatagggggccggacgcaaagatgcgtccggccctttcctttcccgctttcacgcgggcgtctcctttgcggggattttcggccgcgcgcgccgcgctccccgcacggcatggcctgaaaatccgcgtccgcactgcaatgcggcttgcccccgcgcggcggatatgctaaactgaacacaggcggccgcgcagacacccaccgcgggccgtgcccgccgtacccgcccgggagatgtcaaagaacgcgagtgccgcgccgattccctctaaaaacgagcctgtgcacacaggcgatcacgcggacatccgccgcgggacgtgcccgccatacccgctgtcagcggcgggcggtgtagcggcagaagcgcatgtcgatgcctctaaagttttttacgctctcgtccgttttaaccatgccgtttcggatggccacgttctgcgcggccgtgttcgtatcccggacaatggagcagacctcgtgtgcgccgagtacctcgaacgcgtattttttgcagcctgccgcggcctctgccgcgtaccccttgtgccagtgccgccgctcaaaaaggtacccgatttcgagcacctcctcgttttcccacggctgcagggtcagcccgcactggccgatcatcgcgccggtctccttcaggacgaccgcccacaggccgaagcccagccgcttgtagcgggcgatgtgccggtccaaccacccctgcacctcgttgtccgtaaaaacgcgctcgtaggcggggcgcatcgcctccgcatcctgcataattctgcacagggcttcataatctgcctgcgtcatctcgcgcaggtacagccgctcggtttcaaaaaccatattttcagatcctccagtataattaaatccgtgcgcgtaccgcacaggcgcaccgcgtatccatcggcatttactgcggcacgatgcgcggatttttcaaaacagtccggcgcgcgccctctggcgcggcgtctccctgtattctacatcataaagaaaggtgatttcaatggatgtcattttcacaagaaccagcgtgcgcgcctacacggcgcagccggtcgagcccgaaaagctcgagcttctgctcagagccggcatggcggcgccctcggcatgcaaccagcagccgtgggagttctacgtcacagccgaaaaaacgcggctcgaagcgctttcggggtgcagcccgtacaccggctttgtcaaaaacgcggcggccgccattgtgccctgctaccgcaaaagcgggctcattgcgccggattacggggagatcgacctgagcgccgcgtgcgaaaacattctgctcgaggcggaatcgctcggcctcggcgccgtttggtgcggcatcgctccgggccgggagcgcatggaggccgtgcgcgccgcgctcggcatcgcagacagcctcgagcccttcgcgatcctttcggtcggctacccgttaaagcccgcaaagcagcaggaccgcttcgaccccgcccgcgtccacaccgtcagataatctcgtgcgcgtgctgcggccgcgggtagggccgcgggtcgtccgtaacgccgagcagatagtcgatgctcgtgccgtaaaacgccgcaagccggatcagaacaccggagggaatatcccgcctgcccatctcatagtgggagtaacagacctgcgtgcagttcaggtaggcggcgagatccttttgcaggaaatcccggtcctcccgcaggtcgcgtattctcttatacattttgtttgcccgcccctttccaaaagctctcttagaaaagtataggcaaaacaaaatgttatcttgacaaatataacattttgttttatagtaagaaatggaaacagaataaccgggaatgccattgctttggtttgggagatttgcggagaaggcttcgtctttccgtctgtcctgcggccccggccggttgtcctgcccgccggggcatgctgtttccgcgtagcgcagacgggctgcatcgcttcctcagaagcggtgcagcccgtctttccttttcgtctgtcttttaaatggagcggaacccccgcggccgccctgcgccgaatcaggattcatccggatacagccgcctgtcctcgatgcggatcggcacgccgttgacctcgacgccgtcgtccgcgcggatcaggatatacttcgcgccgtcgatcacgcgcgtttcgatcaggccgctgcacgcgggattgacgcggatcgtcacgtccggcgttgtgacctcgaaccgccgcgtctcaacaaggttgcgcgggctgagcgccgtgcccgcgccgaactgcgcgtcgtactgctcctcgaagcgctgtacgttttcgccgggcacgccgcaggcggtcagcatcgagcgcacggtggtctttgagatttgcagcggctcgacctccttgttgaccttgtgctcctcgatcatctccacaaggccgccgtgcacggactgcacgacgtcgaagctgcacgcctctgcgagcgcatcgcccagcaccgtgccgaacgtctccttctgctcctcggccggcatcggcggcgggcagcggaaaaccgcgtccacaaattccgcgtggctgtcggcggcgtcgcgcgcatagtacagcgcgctgtaaatatcggcgctgcggtcgttgaaagccgggaacagaaagccgagcgccggcgcgccgacaagccagtcgatgccgcggttgtgaaacgcattctccggcacactgtaaccgagcaccggcttcgtctccttcaccgggcagatactgcacagcacatagctgtacgtctcgctggaggcgtcgtcctgccgcatgccgtccttcgagcggtacggcacgtcgtatgtatcgtacgcgagcaaaatcaggtacgtaccctccggccggtacgcgccgatgaccttttcgtaaaaggcgttgatcgcgtcttcgtcgtttaatgcggaatcgcgcagcgccataagcaggcggtgctcgtcgctgtcgacgacctgcgccgtggaaaacggcatgtcgatcaggttcttcccctgcgtgcccgcgagcgtgcgccgcagcacggcgagcaggttctcgctctcctcctgcggcagcagcgcgagggactggtcgaacgcggcgacaatctcctgccgctcgttcacgtagcagccgcgcacatgcgtgatgttgctcttatccggcctaaagcgccggcggatctctgaaatttccttttcgttcatcgtcgtctccctttcttggtcggagcatgccgcccgttcccgccctgtatccgcgccgcctgcggggcgctccgccgcggcaaaatcccgcaaaagctgagcggcttccccactgccggcaaaagccaagaaatgaaccgcatcccgaaaatgcggttcatttccttttatgcttctattttacccgctttccgcgggcctgtcaaccttgcggccaaatcttatcgaggcaggctttgatgcaggcgaccttatcgtcatcggtcggcagcgcggcgagcttcgggctgaacggctcggcgacgaccgggcccgtatagccgagcttttgcaggccgtccatcacacaggcaatgtcgatcctgccggtttcgcccggaagagcgcgcggggaatccggcagctcgaggcggtcgatcccgtccggcgcgtcgttcacgtggacgctgacgatgcagcgctcgtcggggatgtggtcgaaaacatcccggttatttgcgccagtgtaccagtggtacgcgtcgaacagcaggccgacgttctcgccgcagtcctttgcgaggccgagcatctcctccgccgtgtagataaaggtgtatttcttgtctttgcggccggtgtaggggccgatgaactcgaggccgagccggatgccgtactgcgcgagcaccgccgccgcgcgggagaggcgcgccttatgcagcgcgtagttttcctccttcgtcagcgtatcgctgccggggaaaatccagatgatgcagcgcatgcagcccacggcgctgagcgcggcggcctgcgccggcagggcctccatcgcggcctcaaagcccgcgtcgtccacctgcgcggggtggaacggcaggtttgagccggaaatctgcatgccgtgcttttcgagcagcgccctcacgttttcggtgccgttctccatgacctcctgcgcgctcgattcaaccgccgaaaagccgtggcgcttcgcgagcagcagcttcttttcaaaatctgtttcggccacattcgcgaggccgaggctgattgactggaacataaacgatccatcctttctcttcgttctgtttttacttttcaaagcctttcccaaaagctcaccccagtatagcacagcgctcggagcagcacaagcccctaattttcgtttttcaccaaaaagttttttatgcgaaatttggaaataacattgactttacgaaccgggaaagctataatcaaggcaactataaacggtaaaggagggcaggcggcgcagagctgcgccgggagttggcggctccggcaaagggccgggaccggcgggtgcgctgcagcgcacctcagttgaaaagtcagaacaaggaggaaccaaaaaatgccaatcggcgttgtgccgtggaccctgaggcatcaggtgtttacggccgaacaggtgaaaaacacgtacaaaaatttgcaggcgctcggcttcgacggcgttgagagtggcctcggcggcggcgcaggcctctccgcagaggaggatctcgcgctgctcgcggaatacggcctaaagccgtgcagcgtttacaccgacatcaaaaatccggaaaaagcgatcgaaaccgcgaaacagtacggcgtgaccgtgctcggtgcgcccgcaattccgggcattatgatgcggcgcgcggagggcttttacgcctatgcggaggagctcaaccgcctcgcagagccgttccgcggctccggcatccgcctgcagtaccacaaccacagtcaggaattccgcaatttcccggagctggacggcaagaccggcctgcagatcctcatcgagaatacagacccggaactcatggcattcgagctcgacgtgttctgggcgtccgccgcgggctgcgacccggtggagtggattgaaaagctcaaggggcgcatcccggtcatccactacaaggaccacgcgatcgactgtacgtcggaggaggtcggcctcggcgaggtaccgcgcatgttcgcagaaatcggtcagggcaacctgaactggaaggccattacggcggcggcgcgcgaagcgggcgtcgagtggtacaacatcgagcaggaccagacgaagcgccctgtttttgaaagcctgaaaatcagcatcgactatatgcgggacgtcctgcatattcaataaggaggagttatcatgcccacagttaagcccgtaaaggtcgccctcatcggctgcggcaatatcagctacacctatctgaacacgctcgtcaagggcggtttcaacatcatcgacgtcgtcggctgctccgatatcatccccgagcgcagcaaggcgcgcgcggagctcttcggcatccgccagatgacaaatgaggagattctgaacgatccggaaatcgagatcgttatcaatacaacccagctttggaaccatacggccgtcacgcgccagatcctcgaggccggcaagaacgcctactccgaaaaggcgatgggcgacacgctcgagggcgcgaaggcgaactacgacctcgccgcagcgaagggcctgcgcctcggctgcgcgccggactgctatatgggcgcggcgttccagaccgcgagaaagctgctcgacgacggcgccatcggccgcccactgatcgcgcacgccatgtgctaccgcggctacaattcgcactatgccgcgagcgacccggccgacccctccgcaggctccgccggcacgacgatcacccacgacatgggcggctactacatcaacgtcctcgtcaacatgctcggcgcggtcaaccgtgtttccggctacacgaagcagtacgatgagcgcgtctacgagaatccgcgccatccgcgttacaaggagccgatcgcgcacgaaatcggcgggaagcgccgcggcgacaccgtgatgctcggcgcgctcgagttcaaaaacggctgcttcggcagcctgaccttctgctccgagggcttcttccccgaggttccgcgcatggagatctacggcaccgagggcatcctcacgctgcccgacccgaataacttcggcggctggggcaacgacgttttcctcacgcgcgtcggcaacgccgtcaacggcaagaacgaggtgttccgcgtgccgttcacgcacggcttcggcgataccgacccgagcatcccgacgctcagcggcaagcgcgagccctgctacaacagctggcgcggcctcgcggtcgtcgatatggcgtatgccatccgccgcggccgtccgcaccgcagcagcgccgacctcgcgctccacaccgtcgagatcatcgacgcaatcgagcgctccatgcaggacaacaaggtctacaccctgagctcctgcccggagcgtcccgcgccgctcacccccggcttcttcggcggcagcatcggcgaggcttcgatcgacaacattctctgatccatattttaaggggcagacgggaaaccgcctgtcccttttctttcgccgtttttctgctattcaatcacatgaacatattattatatatcatcgaatcacgctgtgaggaacgcgcaataggccgcaaatccgtgcaccgcggtccgcaccgccgcatctaaaagaccggggtccgcatcggttgagccagaaaagcggtgtaccgcggtgcgcgcagcataccgcacttgcatgcttgtgctttcccttcttttctgctatacttgggcgtgatgaacggaggggatcgaatgcaatcttttgaaaaaacgctgcgttccgcccgtggtgcgcgtggctgaaaaccaaaccgtgcgcggacggttcgcgccgagcccgtcggggcgcatgcacctcgggaacctgtgctgcgcgctcgccgcatggctctcggtgcgcagtcagaacggcgttatgctgctgcgcatcgaggacctagaccccgaccgctgcaagccggcctatgcggagcagctgatggatgacctgcgctggctcggcctcgactgggacgaggggcccggcgcgggcggctgcggcccctatttccagagcgcgcgccgcgaactatacgaggaagcgctgcaaacgcttcgcgcgcagggcaaagtttacccctgcttttgcacgcgcgcgcagctgcatgccgcctccgccccgcacgccggcgacggcgtattccgctacccgggcacctgcctcggcctcaccgccgcggaaatcgccgaaaaaagcagaacgcgcgcgccggccctgcggttttgcgcgccggagggcgaagtgcggttcgacgatcgctttctcggcccgcaggcgctcgacgtgcaggccgtgttcggcgattttctcgtgcgccgcagcgacggcgtccacgcgtaccagctcgccgtcaccgtagacgacgcgctgatgggcgtgacggaggttgtccgcgggcgcgacctgctcgcctccacggcctgccagctccgtctgttcgacgcgctcggcgcccgatcgccgcgctacggccacgtgccgctgctcacgaatgaaacgggccgccgcctcagcaagcgcgagcgcgatctcgacgccggcgccctgcgccagcgcttcacccccgaggcgctctgcggcagaatcgcctgcctgctcggcatgctcgaccggccggagcccgccgccgcgcgcgagctgatcccgctctttacaaaagcaaagctcagccgcccggcgatcgccgtgccggacgacttcgccctataaccgcacaaaaccccggatttcaaagaaatccggggtttttctcgtttacgctttttcgaggcgggatgcaaaatcgcgcattatgccggggatatcgatcccctgcggacatgcccgcgcacaggcgccgcagccaatgcaggccgctggaagcgcctccggcgccatgccgccgaggttgaagcgcagtaaattcatgccgtccacgcgcagctcgttgtacatcgcgatcagcttcgggatttccagcccctgcgggcagtcctcgcagcagtagcggcacgcggtgcagggcacggtgtcggctaagatgccgacgaccttttgcagcagctcgttttccggcgcagtcgtcgggtcgtccttcgagaacagcgcggcgttttcctccagctgctccagcgtcgtcatgccgctcagcaccacctgcacattgggcagagacgtcaaaaagcggaatgcccacgaggccgtggaatctgccgggcgcgccgccttcagaagccgctcggccgcctccggcagcgcggcaagcctgccgccgcggcacggctccatcacgatgaccggaagcccgtgcgccgtgacgaccgcatatttctccgccgcgccctgcagggtccagtccatgtagttgagctggatctgcacaaattcgaagcagccctcatacttcgtcaaaaagcggtcgatcgtgtcggcccgcccgtgcgaggaaaggccgagatggcggatccgcccccgctttttctgctcgagcagatatcccacgacgtcgagcgtttcattcgtgtaaaaatcccacgagctctcgcagacgttgtgcagcagatagaagtcgaaataatccacaccgcatttctcgagctgttcttcaaaaatctgcgcgatcgattcgatcttttccccggcaagatagccctgaaagccgagcctgccatccttaaaattcatcatgtgcccgggcattttcgacgcgagataccaagtgtcgcgcgggtactggcgcagcacctcgccgacgaacgactccgattcgccgccgtggtaacggtacgccgtgtcgaagtagttgatcccgcacgcatacgcgcgctcgatcacggcgcgcgccttctcccggtcaatcggcccgccttcgcccgcagtcggcaggcgcatattgcccatgccgagcacggagagctttaaatccgcaaacggtttatacagcattttggtttcctccctgtatcctttttttatattattatataggctccagcttactggaagtcaagcccaagattttttcggccgaaagcacggaaaaggaggggcgccgcccgaaagcggagcccctctcccttctgcgccgcactcaggaggccagtcccgacttacggcgcatgtgcttttcgcggaacgcaggcagcgcggcgcgcccaagctctgtgacgggccgcacccatttgcccgaatacatgtgcacctgcatcaaaataaagcggatcggctcatcgatgtaacagcaggcgaagatgagcaaaaacggcgccttccacacgaggcccgtcaggcagacgcacggcagcacaagcgcgtacatgaacgagatctcgaggatcgtcccgtacgccgcatcgcccgccgagcggtacgtgtcgttctgcgtccagttgcacatgcggatcacagcggcgacgcagtagatcatcaagaggcccgagccgatttcaagcgattcgcccgaaaggctcatgacggagagcagcggcttgtgcgcggctaccagcgtcagacacagcacaaagatgctgctgccgcagagcaggacgaggcgtttcgcccgctcataggccgcgtcgagctcgcccgcgccgacgctcttgcccacaagcaccgaggcggcgttcgagaatcccgagaagaagccgatcacaaggccctccagcgtgcggaaaaccgcgatcgcggcgatcgcctgctcagactggcggccgagcacgatgttgatgaccatgttgcccacgccgatcaaaatctcattgcagagaatcggaaagcacttcacaaaatacgccttgacaaacgcgccgctccagcggaaatgcttcgtgaagtggaacaggtaggggtacccctgcgcgcggcccaaaacgacgatcacaagcacgttgacggccgccccgcacaccgtggccagcgccgcgccgcgcacgccgagcgccggcatgcccagcttaccgtagataaacacccagttgaggctcatattcgtcgcgacggaggcgaccgccgcaaacagcgggatgcgcacgcgctcggtcgagcgcagcagcgcgctcatcgccatcgagatgacctgcagcaggtaggcaaagcccacgatttgcaggtaatcgacgccgatcgcctgaatcgacgccttgtccgtatagatctgcatgacgagctccggcgcaaacagcgcgaggcaggcgaagatagaggcggaggccagcatgcacacgagcgtcagcccgtaggaccggtcgatgccgttttcatctttcgcgccccaatactgcgagaaaaacagcatgccgccgcccacaaagccccagtacccggagaacatcagcgacgaaaactgtgcgcataggcccacggcgcccaccgcggtttccccaagcggcgcgatcatcatcgtatcgaccatgctgcccgtcgtcgtcagcaggttttgcagcgccaccggtatggcgatcaccgcgaggctccgaagaaaggcgccccatcgaaattcagcttttgttttcaacacattctccccattttcgttgatttccgcaccagtatagcacaaaacagggcggaacgcaatgtaaacacgccctgtccgggtatggattcacgcgttccgccctgttcttacctgtgcgccgagcgctagtgctctgtaaactgcaattcaatcggcaccaaatgcgactgaccgcaccgcgggcagacgacagtgatctcccgcggctccaccgcgttgatccgttcatacatgttgtgtaagaattcgaggtccgccgtatacagccgctcaatcacctccggcgtaattttcaccagtgtcccaatccgcgtgaccacgcggctcagaagcaggatcatgagataacccgaattgctctgtacacgcggatctttgagcggcaaaatctcatccgccgcagtcgacaggcgcatcacgccctcccggtgcaccgccccgtcctcgtccacatagccgcacggcagtgtgaattcaaattccgtttgaaagctcaccacagatcgcccctttaatttcagattcctgcgcagaaaagccttgccgctgccggcttcctctccaagcggttttggtttggacgccggcgcagaagagcgccttcccaaacgcagcctaaagcaaatcatttgctttattcaattaaaatgattataccatatgatctgcggcgccgtccagcttttctaaaaaaacgacatttcaatcaaacatcccctagccggcggcacacctagaaattgcatcacagggtccgcctgccttattccatttgcagtgcatcgtacacagccggtacttcagtcttttcaccttacacttttgcgttttaaatagcagtatcatccagaaaaatggaaactgtcgcgatctttccgatgcctgcacagctttcaaaccggaaagaaaatgcgcagccgtatttgagccgcagccgttcatagatgttgcgaagcccataaaagatcccggcgccgcatccctcgcgcatggccgcctccattttctgcgggtctccccctgcaccatcatcctaaacagagatgccgcccgccgcgtgcttgtactgatctttggctatatccctgtcctgagcggcctgctcatgacttttcaggaattcaacattatgggcggtcacttcggcagcgcatgggtcgatttcgcacagtttgagcacgcttttttcgacttctcttaccatcttgtcctatggaattcctttatcatcggcgccatgaagctggtcatcacctttcccctttccatcctgctcgccattctgatcgaccagtttcggaatgtgctgttcaagcgcacggttcaaaccctgatctacctgccgcactttctatcttgatcaattgtatacggcacttttccggcaattccgggctatggtggccccgtcaaccaattctttgctctgatcggactggagaaggctcccttcttcgtcacaccttcggtttttcgcggcgtacttgtgacatcggaggcgtggaaagaggtatcaagccgccccatccggcttaactttttcatacgctttgcctgcgaaaaggagggagcagcattctcgctctccatcgtaatccgcaggttttcctgctcgtccttcttcaaaaaggacagttccaccgcagggataagggcagtctgcccctcgtccaccatctgcaaaatcggcgggattaacgcggtcaggcggatatatcgctgtacctgtgtgcggctgtctcccgattgctttgcccgcaattggagcggcatggacacgagctttaggcgattgctgtcttttccggcttatcgcttatatttttgacggtgctatatagggatttcaaaaaggaactgtgttccctgtccggagctttggagcacccggacgcttccaccgtggagttccgcgatctcccgaaccagagccagcccaagtcccgctccgcccatggcccggcttcgggacttgtccacccggacaaacgggtcgaagatctccgtccagcactctctggggataccgatgccggtgtccgtgacctgtaaatgggccgtgtcgccggcccgctggatcgccacccggacttctccgcccgggcggttgtacttgatggcgttttccacaaggttatagaccgcccgatacagcagtgtatcgctgccggtcaactcggcatctcccgggtcctgaaccagcgccaccttcttttcctccgccacttgagccagatcgcagagaacctcctccgtcagggcgaagagggagatgtggtcgcggcgttctatcgtctccagcccggtcatctccagcagggcctccaccacccgggacaactgttccgtttgatcggacacgctttggagagtctgggcgtactccccgaccgctggggcgtttttcttttgcagcacatccagttccgcccggaccacagccagaggggtgcgcagctcatgggcggcgttggcggcaaactgccgctggacggtgaaagcgcggtccaaacgggccagcattttgttaaaagacagggtcagctgggagatctcgtctttggtgtctggaatctccagcagctccgagagattctgtgcctgaatggtctccatttgggcgcagaacttttttatgggcgccagtccgcggcctgccagaaaccagataaacgcgcagcccagcaggataatcgctaacgtagcaaaaatactctgcacccggaagccgctgatcgtctgctggagctgttcctgcagatccgggtagagagtaccgaaatccagctggaaggtcttctgaccagcaggcgaaatttcgaccacataatcctcaatttcttggatgctcataactgcggagcagctgatgaacaggttcagcagcagacaggccgccgccatcagcgccgcggtcatcagggtcaggcgccatctcagaggcagattcttcatgcagggccacctccgatcagatagccctgccccaccttgtttcggatagggtcgtagcccaaagcggtgcggagctttttccgcagggatgagatatggacccggatggagttgctgaaacagttcacgctgccgtcccacaactgctccatcatctcctcctgactgatcacccggccctgatgcaaaagcagatactccaacagggcggactccttgcgcgtcaaagccatagcctgtccttttgcataggcgatcctagctttggtatcaaaggagatctcaccatacaaaaggcacacatcctcctgcacgaattttcgccgggtcaagctgcggacacgggcctccagctcctcaaaatgaaagggcttggtcaaataatcattcgctccggcatccagcccatccactttatcctgaagctggcctctggcagacaggatcaggaccggagtttcggcatcctctgcccgcagatggcgcagcagctccatcccgtccagacccggcaggctcagatccagcaggatcagggcgaaccgttctacgcagcacagctccagcgcctcctgcccgtcgccgcaggtatccacctcgtatccgtccagccgaaggccctccgcgatagactggcacagggccggttcatcctctaccaccaataaacgcatcgtcgatcactctcctttataagcagtataccatataatcagcaaactgcaaactgtttgtgaacaccctgtattttacaggagtcttaacaaagattttatccccgatatgataagatagctctatcaacgacaaaggagtgctttttccataatgaagaataaaaaaatcggcgcggccctgctggccggcatcctatccatttccatcctgactgcctgctcttccaaggagccggcttcttccacaccggacggtgccggacagagtgaggccagcagcagtgccggacagagcgaggtcagcagcagcaacagtgaacagacttccgctaacgtttatccctttccgaccctcggtctgtccatggtgatgtccccagatcttgaacagcggatgaagggggatgtggtcgtgaccattgatgagaaagtcgaagacgacggaactacccttcgatatggcaccgtaaactggcatcggatgccgagtgagatggcagagaccagcgttgcgtcggacagtctggagcgtattggagttctgggcgcttatcaggcagagcttgtcgatcagctggatgagctgaccggctgcgacaaccatcaggaggtaggccgcagcgccgacggtgcgtatgtgtattacctcagcaccaactcagcggcggataaagagctggtcgaggaggtccgcaagactcaggtgactatcacggaaatggaatctgttgatcattccgacgacgtcccgagctccagcttttccggaacctctgtaagtgacttcagcacgcaggatgtatacggcgccgcatatactcaggacgttttcaaggactatgacctgaccatggtgaacatcttcaccacttggtgctccccctgcgtggcggaaatgcccgagctggagaaactgtaccagcagatgaaggacaaaggcgtgggcgtcgtcggtgtggtgctggatgtgctcaatgagaaaggcgaggccccgcaggaggatctggagcgggcgcagactttggtggagcgcaccggcgttacataccctgtcctgctgccggacagcacctatttcaacggccgcctcaccggtattgaggctttccccgagacctttttcgtggataaggacggaaatatcgtgggcgaaacctacagcggaagcggtgatctggagtactggatgtccatcgtggaaaaggaactggccgctgtgaaggagggagcctgatgcggcatctgctggcttcccgctggaccggcatgaccgtggcagtcttgggccttgccatgatggggtacggcatttatcggggtgaggtctccacggttttcaccaaggccatcaatatttgtctggagtgtatcggaattggctaagaagaaaacaagtaaatggtcccgccacgggtttcaggccctttgggcgctgctgaccaacagctacctcatcggctttgttcaggggaaaatctacaaggggaatctgaaaaagctgtgtgtgccgggaatgaactgctattcctgtcccggcgcggtaggctcctgtcccatcggttcccttcaggcggtcatcgggagctggaacttcaaattcgctttctatgtggctgggtttctggtctttgtgggggcgctggtgggacggttcgtctgcggctggctatgtcctttcggactgattcaggatctgctgcacaagatcccttttccaaagaaactccggacctttcggggcgacaagctgctgcgcaagctgaagtatgtgattctggtggttttcgtcattctgctgcccatgtttctggtggatgtgatgggtcagggcgcaccgtatttctgcaagctgatctgtccggtagggacgctggagggcggcatccctctggcgctgatgaacaaatccatgcacagtgttctgggctggctgtacgcttggaaaaatgtcctgctcgtagccaccattctgctctccatcatcatctaccggcctttctgcaagtacatctgccctctgggggccatctactccgtattcaaccccatctctgtgttcaaataccgggtggatgagagcaaatgcgtaagctgcggcgcctgctccaagtcgtgcaaaatgggggtagatccggtacagaacgccaatcatcccgagtgcatccggtgtggtctgtgcaaaaaggtctgtcccaccggcgcgatctcctctggctgcctgaaaaggcagagtacagcagacccggcaaccatagagaaataaaaagccggataaacagacggcccaagtgaacgccaaccccgtgcctgcgctatacgcggatcgaggccgcggtcccgctctccaaattaaaggaggatttccagcggcagggcttctgtctgagccatttcagctatctggtcaatccggcccatgtgatgcgggtgaacccgggctaccctgattctggacgcgggcgagtccatttccgtcagccgccggtactattcggacttcatagcctgctatgtgaaatccctgaaataaaaactccgccgttccctgaaaccggaacggcggagttttttatgcttcctctccgtggagcagcagagcggttaggctcagggcgtttaggcctgcccggagatatggaaggtgatggccgagaaagctgacgccgcccagcgaggccagcatcagggaacggtgcagagatactactatgaggttcaggcggaacttagaggagacgaaagcccggcaccgcggatataaaaaataaaactatcgcctcagattttgccggtcatcaaacaaaataagggctctccttcccgaaagggattcccttcaagtggtcaaaacagaaattcgtctgtggtattcctgtggttaaacgaaagacgccgctgatccggcggtgtctttttgaaattatgagcgccacatgaaaagatattttggccctttgtaggttgaatttaagccctcacataagacaagacttaaaaaacgggtaccggttaatttcatattcgaacttcttagtgctttcaaaacagaagaaaggattcgactttagattttatctccaaataaaatccaatgcctcaaagctcgccaaactgattgaatataaattctgatttttgagtaccaagaaactgaaatttattgttccaattcttcctttgtaggtatttcaaataatcctgaccatttatcgaattcttctttccccacataaaatatagcgttttttccagccaatttattgcggacagacaatcgttcccaaataatgtcgtttggaacgtccatataatggattttggaatttgctccaagggaatgggcctttcgtctgaattcatcacgttctgattttgtccagaatccaaagtcaaggataacatcgacacccgacttcaaaactttcacagcgattttccacatcagttcttcaaccttggtatgacgttcatcgtgttcggggtctgcgatgtcatggccaaacaaaaaatactgccactcatcgggtgttaatctcaatgctttgtacttgtgctctaattctattgcttctgtagtttttccactgcccggtaagcctaccatcaaatgaagtgtcgccatattatgcctcgctaaatgtcgaatttgttgatcagattataacatatattcgcagctttctccacacataccttatggcaaaagaaaaaagcgatctcgaaaggctgcttaaatactgagcctatataaaaaacaccattgagtccaaaccacagggttcagatttcaatggtgtttttatttggtggacccgaaggggatcgaaccctcgaacctcacggatgcgaaccgtgcgctctcccagctgagctacgggcccataacgtccgctgtgtgcggacttttgtgtcgattaaactcaacggtgactattatagcatactcttttgaaaaaatccagtcctattttcaaatttttcaaacttttttctcggaaaacagctgaatgttcagccagcggttcgaatacagccggaacataaagatcatgccgcgcacaatgagctcgaccgccatcgcaatccacacgccgatcagcccgagctgcggtgcgagcagcagtgaaagcgtgatgcgcacgccccacattgtgatcaggctgatgataaacggcgccttcgcatcgcccgcgccgcgcagaacgccggtgacaacgatcgacgccgcgaagagcggctctgcaaacgcgacgatgcgcagcacctgcgcaccgagcgccatcacctcggggtcggtggagaaaatcgaaatgagctgcggcgcaaggaaaaacagcccggcaccggcgagcgtcataatcataatgccgatgtacgtcgtgatccggctgaaccgcagcgcgagatccttccgcttcgcgccgagcgcctgcccgaccagcgtcgtgcccgccgaggcgacgccgaatgccggcatgtagctgaccgactccgccgtgaccgcgagatgatttgccgcaaccgccgccgtgccgatcgagctgatcacaccggtaatcacgatgttcgccgtgctcatcagcgtgcgctcgagcgcgacgggcaggccgaggcgcagcgccgtgcgcaggcaagcgcgttcaaagcgaaagcgctccttgagtgagatgtgcagcggcccgcgtctgccgcggaaaatcacgagcagatacaaaaggctgacgatcatcatcgaaaacgccgagccgagtgcggcgcccgcaacgccgaggccggcgccgggcagtgtgacggccaccccaaaaaccgccgccgggcgtgtcggataaatgaggagaaaattcaaaatgatgttgaacacgttgatcagcaggttcagcaccatcggcgtgcgcatatcgcccgcacagcgcagaatagagctgagcattaccgagcagaaattgaagggcagcgcgatgccgatgatgcagaaatacacggtcgcgtccgcccggatggcctcctccgcgccgagcagcgccggcagcgggaacgagagcgccgccgccagcaccgcgagcagaacgccgaacagcacgacaaatttcagcgcctgccacgtgacgctccgcgcctctctttcccggcctgcaccgatgtgctgggccacctgcaccgaaaatccgaccgccgcggcatttaaaaagccgttgaacatccacgtcgtgctggccgtgagccccacggccgccgtcgcgccggagcccagcgtgccgaccatcgcggtatccacatactgcaccatcgtgatcatgatctgctcgacgatcgcgggccacgccagcgagagcacggcgataaaggacgtgccgagcggcggcacgcccgtgtattgcagcagccgtgctgcggcattctgtttcattttgcagctcccccttttttgcttccccttagcgcccgcgggcggccaagccggcccgcaggtcattttccgcatccggctgccttgccggatgcagtcatcagctattttccttattgattgcgtcgataaacgcgggaatgagctgctttttgcgcgagacgaccccctgcagccagatcgtgccggcctgcggtgcgcggccgaacgcctcctgcacgagctgctccgcagcctcgccgtagcacatcaggcgcgtcgattcctccatgatattcgtcagcatgaaatacatcatcgagaggccgtgctcgcggcaggatttctcgaggtacgggcgcaggcgcttctcgatttcgtcgagctcgccgccgctcatgctgttgatctggccgacgccgaacgtcacgtcgccaaattcgaacttcttgtagtcctgatagaagatctcctccggcgtcttgtccttcagattgctgccggcggtgaacatctcgatgccgaacgcctgacagtcgatgcccgcgatcgcactgagcgcgtccgccgccatgcggtccatcatcgtgcaggtcggcgagcggaacacgagcgtgtcggagaggatcgcgctgcacagcaggcccgcgatctggggcgggatctcgaatcccttttcgcggtagatctggtagataatcgtcgcggtgcagccgaccggctcgtttctgaaatagaccggcgccatcgtctcgagcgagccgatgcggtggtggtcgatgatctcgaggatctccgcgtcctcgatgttttcgaccgcctgaccgcgctcgttgtggtcgacgaggatcacggcgcgcttgcgcacggcgagcaggttccggcgggagatcatgccgatatatttgccggatttatcgaccaccggaaaatcgcggatacgcgtgttctgcatgctgtccttgatcgaatccgtgtagtcgccgggcaaaaatttgacgagcccctcgcggcgcatgaaggcgcgcacgggcatgcactggttgatgcgccgggcgaccgtgtacgtatcgagcggcgtgatgatgaccgtgcacccgtggctgttcgcgagcttctggatgctgcgcgaaaccggcgcgccgaggcagaccacgatacagcccgcgcctgattcgatcgccgaaagctgcgattcatagcggtttccggtaatcaccatgtcgctctgctcgatgtaattttccatcacgtccgggtcggcggcggagatcagcacattgcccttttcgaatacagcctccgggtcgccgacgaccatctcggcctcgagcgtctccagaatattccgatacggcgttttggcctgcgcgatgatcgtgctgtcctgattctccatgtaggaggtcgcgatatcgttgatcgtgatgataccgtcgagcatgttgtcgccgtcgacaatcggcagcgtaacggcgttcagctccgccatcatgctccacgcctttttcatcgaaatatcgtctgaaatgccggggatgcggcggatgtccatgtcgcgcacacgcgtgccgatgttgttcacataggtcggctgacgcatgccgaagcggtgcagaacatagctcgtctccgggctgagctggccggcgcgcgccgcgatgtagcggcagccgtcgttctcgcggtttttaacgtccgcatatgcgatcgccgagcagatagaatcggtgtcggggttgcggtgccccagtatgtaaacctctttttttgcgctcatatggtctgaccactcgcctttctgtgggtaatgccgatcggtccattcctattatttggataaagctagtataccacagctttcgcaaaaagcaaagcggaagccgccgggaatttcagggaaaatgctgttttctgcattggatccgtcgaaatgcgggcaaaaaaacgcgcggcgctcattccttctgaagcgccgctagcataccgtatatttccttttgaccgagatcggcgagctgccgcgccgtccgcttttccgccagcgcatgcacaagctctgcgccgaggtaatagcccgtatccgaacgcccctcaaatgcgcaccaatccccgaaaaagtcctgcgtgctttctccggcgtccacgcgccgctgaaattccgcggaaagccgcgcgcggttttccccgcaccatgccagccagccgccgcggtcctgactgtaaaaataccggccgccaaacagcttttgctggatatacaccgccatgccctccgtgtagagctgccacagggcgcgcgccgcgggggtttcaccccatgcaggcgccgtgcgcatctcaaagtgccacaggtgcccgagctcgtggcagagcagcacggccatatccgcctcacgctcccaaccgagctcaacaattttttcgatgccgagcagtacaaccggcctgccgccgagcgccgtcgcccagcccgcaccgctgcacaggccgagatagaaaacgacgtctgcctccggcgctgagcccagcgcgctgcaaaaccgctccgaaatcccctgcaccgctttttgaaaggacgcgtgtgcccgcgccgcccggtcgggacttctgtaaaactcctccagcaccggcaaaatctcgcgtgaaaaatcatattccgccgcgtccgcctccgccttttccggcagctcgggcgagatcgccgcggcgtaccgccgccacgcctccagcgaaaagccgccgtccgcaaagacgggcgcgatctgcgggaaactgtcgatgatcttcatttcacacatccttttgcaggatataatcgtccatcacgtaaccgcggccgatgtccgtcacgaccgaatcgatctcgtaaaagccgaagtggcggtaaacctcgatcgcgtgcgtgttgcgcttgttgaccgtgaggtaaattttatcgagcccctccgccttgcagcgcgcctcaacaaaatcaaacgccgcgcgcggcaggcccgccccgcggtgcgcctgtgagacgtacagcttgctgaggaacatcttcccctccttgtgcggcacgaggccgacaaagcccacggcctctccgccgcgcagcatcaggtagtaggcgtgcccctcccggtcgagctggcggcggatcgccgggacggactgaaactgctcgatcatgtaatccgtcgcgtctgcgccgttgatcgcgtcatacgtcgcgtgccagatcggcgctgcgatccgcgcgacggtttcgatctcctccggcgtttccacccgcttaaaaacaacctccatgtttctgcctcctgttcgtcagccttccctgtagttgccgaggaacgaaaagcgcggcatttcgccggaaagcgcgcagatcaactcgagcgtccgcgcatcgtggatgttccccgaaaaatccagatagaagtcgtattcaaaattccgccccggaatcgggcgcgattcgatcttcgtgagattcagcccgctgagcgcaaagcgctcaagcgtgcggtacagcgagcccgtcgtgtgcggcagcgaaaagcacaggctgatcttgtccgcatcgtcgggcagcacggcctcgcgcgcaatgacgacaaaacgcgtgcagttgttgccggtgttctggatgtccgcggcgagcgtttccagcccgtagaacgcggcggcctccgccgagcagacggcgccgagccccgcctcgcgcttttccgccacgtgcttcgccgcggcggcggtgttcgaaaacgcctgcgcctcgatgccgcgctgtgtgagaaacgcgctgcactgcgcgagcgcctcctgcttcgagattacccggcgcaccggccccgtgcccggcgcgcagcacaggcagtgccgcaccgggatgtccgccgcgccgacgatgaacatgcggtgccgcaggatgaggtcgtacacctcggagacgctgcctgcatccgaattctcgacgggcacgacgccgtaatcgcccgcgccgcttcgcaccgcctcgaacacatcgcaaaagccgggcagaaacgccggctccgcgcccgggaacagccggttcgccgcgctgtgggaatacgcgccgggcgcgccctgacagatgatgcgcgggttctgcttcatcgcgcgcggcgaatccttttcgagcgcgcgcagcgcgccgccgctctcgagcatcgcgtgctggcgcgcccggctgatcgccatgatcgcgctgtagagcgcggcggcgctgtcgccgtatattcccgcctcctgccggacgcggtctaaaatcgcctgctcccgcgccgcgttcagcaccgggatgcccgcctgccgcttgatttccgcgacgcgttcggaacacgccatgcgctctataaagagctgcaagagctgcttgtcgatgcggtcgatgtcctgccgcaccggcagcagcagcgcgtcaaaggtcttgttttccatgccattccctcctgtaaatcagcgcagcaggtccaaaagcgcgatcgccgcgcaggcctccgcgaccgggatcgcccgcgggacgatgcaggggtcgtgccgcccgtgaatcgtgagcggcgcctcctttttctccgcgagatcgacggtctgctgcgcctgcccgatcgacggcgtgggcttcacggcaatgcggaacagcaccggcatgccggtcgtgatgccgcccagaatgccgcccgcgttgttcgtgcgcgtgcgcaccgcgcctttagcatcgtaatagaacgggtcgttgttttcgctgccatggagagccgccgcgccgaagcccgcgccgaactcaacgcccttcacggccgggatgccgtagaggatcgaggcgagcacgttttcgacgccgccgaacatcgggctgccgacgcccgccggcatgccgaccgcggcgcactcgatgaccccgccgacgctgtcggccgcaagccgcgcacgctcgatttcgtcgcgcatttttttctcggccccagcgtcgcgcaccgcgaagaagcgggtgttcagcgcgttcagctccgcggccgaaactgaaaccgggtcaaacagcgtgtccgaaacgtttccgatgcggcaggcgtgcgcgccgatcgtaacgccgcgccgctcgaggatctgccggcagaccgcgcccgcgaacacgaggcaggccgtcagccgccccgaaaaatgcccgccgccgcggatatcgtttgcgcccttgtagcgcactgcggccgtgtaatcggcgtggccgggccgcgggtgaatcctcaaatcggcgtaatcctttgagcgcgtattcgtgttttcgataatcgccgcgagcggcgcgccggtcgtcaccccgtccaaaaggccggagaggatctgcggctcgtcggcctcccgccgcgccgtcgcggttttatccgtgcccggcgcgcggcgcgccatctgcacgcgcaccgcgtcggggtctatcttctcgttcggcgggaggttgtcgagcacaacgccgatcgcccccgtatggctgccgccgaaaacggacagccggatgttattcccccatgtcgacgccatcggcctttccccctatcgctctgaaatcccggaaaaagcccgggtaggatttacggatgctctgcgcgtccgtgacggtcacggtacagtcgcaccccgcggcggcgagcgccatcacgacgcggtggtcgttgcagccctcggccctgccgcccaaaagatgcgccctgccgcggaccacaagcccgtcctccgtgctgcgcacatccgcgccgatcgcggagagcgccgcctccatcgccgccagacggtcgctctccttgatgcgcaggcgcgccgcgttgtaaatgacggtttcgcccgcggcaaacgcggcggtcacggcgagcgccggcaccatgtccggaatctgcttcgcatcgatgcggatgccccgcaggccgcggaacggctcgcccgcacgcgggttctccgccgtgtacacgccgcttttctcccggatctcaaggccgaagcgccgccaaagctcgacgcacgcccggtcgccctgcacggaatcgggccgcaggccgcgcagggcgaccggcccgccgccgaccgccgccgccgaaaggaagaacgccgcctgcgaccagtcgccctccacgctgtacgacggcgcgcggtacgcctgcccgccgggcaccagccagccgcgcggcgtctcccgcaccgaaatgccgaagccgcgcagcacctccacagtcaggtcgatgtagcccttcgattcgagcggcgccgtcagcacgatctccgaatcgccgtgaagccgcggcagcgcaaaaagcagccccgtgatgaactgcgagctgacgttgcccggcaggcggtattcgccgctttgcagccgcccgcggattttgagcggcaggccgcccgccgtctccacctgcacgccgtgctgcggcagaagcgccgtataaacaccgatcgggcgctccggcaaccggccccgcccgataaacgcggcctcgatgccgagcgcggcgaacaccgggatcagaaagcgcagcgtcgagccggactcgccgcagtcgacgacggcgtgcgccgggcgctctccgggcgccacccgcacaacgccgttttcaaacgaaaccccggcgcccagcgcgcggatgccggcgagcgtcgcgtgcatgtcggcgctcgcatcgaccggcgacacggtgcacggtgcgccgcaaagcgcggcacagagcagcgcgcggtgcgctgcgctcttgctcggcggaatctgcacgccgcccgcaacgcgtgccgggcggtagatcacttcggccatttttatccatcccttccgcggaatccgcgcttatttctttctccggttctgctccgccgcaattttatagcggagcacaagataactccggtcaatcgggtggatcacgcagtcgccgatcgtttttaacaggatgaggttcagcgttttgccgaagctctttttgtcgagcgccgtcgcctcgacgatctcggcaaagtcgaagccgctcttcaccggcaggccgtagctctcgagcacgcggcggatgcgcgccgccgtgcccatttctgtgataccgaggctctcgccgacctcggccgccatcaccatgccgatcgcaaccgcacggccgtgcgaaagcccggaaaagccggtcagcttctcgagcgcgtggccgaaggtgtggccgaaattcaggatcatgcggcggcccttgtcggccgtgtcctcctcgacgagcacctttttgcaggcgatgcagtggccgatcgccgcctccatgcggtcgatgatctcgccgttttcgagcttttcaaacagagcggcgtccatgatgcagccgtatttgatgacctcgcccatgccgtccgtaaaataatgctcgggcagcgtgcgcagcgtttccgggtctgccacgacgagccgcggctggtggaacgcgccgacgaggttcttgccgaacggcaggtctacgccggtcttgccgccgacgctcgcatcgacctgcgcgagcagcgaggtcggcacctgcacgaaatcgatgccgcgcagaaacgtcgccgccgcaaagccgcccatgtcgcccgcaacgccgccgccgagcgtgacgatgaaatcggcgcgcgtgaagccgttttccgaaagcgcctcgtacatctgcatgacggtcgaaagctgcttgttcggctcgccggcctcgaacacgaaactcgaaacgcggaagcccgcctccgaaagcgattttgcgaggcgctcgccgtagatcgggaacacgttcgtctcactgataatcatcgccttgctccccgccttgaacaggggcttcaaaagcgcgccggtgcggccgagcgcgccgctctccacgacgacgtcgtacggtttatctgtggaaatcgtaatgaccattatccgaatttctcctttttttcgcgcgccgccgaaaggagcgccacggttttttcccggtcgccgcgcgcgacggcgtcccgtatatcctcgatgttgcggatcagctccgaaagctcgtccgtcagctcctcccggttcgagaggaacaggtcggcccacagttccgcgttgatccgcgccacgcgggaaacatcccggtagctgccggcggaaaaaccgccgtgcatcgcgcagcgcgggctcatcacatacgcgcaggccagcacatgcggcacctgtgaggtgtaggcaatcatgcggtcgtgcttctgcgccgtgcagcactggatcgtgccaaaacccatcgcctcggcaaggccggcgagcgtctgcacagccgcctgcggcgcttcacccggcacgaggatgtacgaggcgttgtagaaaagccccgcatcgctcgcctcaaagccgctcagctccttgcccgccatcgggtgcccgcccacgtagataaagccgtgcgcggccgcaagcgccgaaagcctgccgcacacgccgcccttgatgccgcagacgtccgtcacaatgcagccgggcttgaagcgcgcggcgttttcgccgacgaacgcgaccgcgtcctccgggtacaggcagacgtagacgacgtccgcattatggagcgccgccgtgctgccgatgcggtcgatcgcaccgagggagagcgcgtccaaaaggacgttttcgtcgcggtcaaggccgatgaccgtatgcgccgtattggccttgagcgcctttgcgatggacccgccgatgaggccgagcccgaggattgcgatcagcatgaaaatcaaccttccttttggcgggcgccgctgcccgcagcgcccgggaattccggcttacaggcccctgaccgtctcggaaacggcgcgcacctttttcgcgagcacgtcgaattggtcgggcgtcagcgactgcgcgccgtcgcacagcgcgcggctcgggtcgttgtgcacctcgatgatgaggccgtccgcgccgacggccgccgcggccaccgcaagcggctccacaagccagttgatgccgctcgcgtggctcggatcgacgacgaccggcaggtgcgagaggcgcttcaaaatcggcacagccgaaatatcaagcgtgttgcgcgtgaacgtctcatacgtgcggatgccgcgctcgcagaggatgacgcgctcgttgccgccggccatgatgtactcggcgctcatcagaagctcctcgatcgtgttcgcgaggccgcgctttaagaggatcggcttatccgtgcggccgagcgccttcaaaagctcgaaattctgcatgttgcgcgcgccgacctgaatcacatcgacgtcctcgaacaggtcgagatggctcgtgctcatgatctctgtcacgatcggcaggccggtttcccgtctggcctccttcagaagctcgaggccctcggccttgaggccctgaaacgcatacggcgaggtgcgcggcttgaacgcgccgccgcgcagaaacgcagcgcccgccgccttgacgcgcgcggcgaccgcgcagatctgctcttcgctctccacggagcacgggccggcgatcagcgcgaggctgccgtcaccgatcttctgcccgcccggcagctcgacaaccgtgttatccgggtgaaacttgcggttcgcctttttatacggctcctgcacgcgcttgacgctctcgacgatgtcctgcgcggcgatgtactcgccgtcaacggcggcggtatcgccgagcaggccgagcacggtggaatgcgtgccgacccaggtgttcacggtcacgccgtagcgctcggtgagcatatcgacaaagctgtgtacctgttcctcgctgcggttggattttaagacgatgatcatggtggtttccctttcctttctttgccgcgggcccggggccctgccgcaggccgcacggcccacaaaaaaagcggagcccctgacggctccgctctggcattttgcttgaagttgcagaatatccgatcagcgcgcgaaagctgcgcgcaccgccggaaaagcgtcacccgggttattcacatacgacgaaaagcacacgctgaaaaatcgtgtgctgctatactttgtaaatcgtcttgtgaataaagcggagcgcatacctgttgccatccttcacagtttttccgccgcccgccggcgcggaagaacttaatggtaaaagtttacccccagccgcgcgatttgtcaagcgttttcttgcggctgtgccgggcgccgcctgcggcgccgcttccggcggcgcttttccttcgctggcgcgcccccctgcggctgcgcggcgcgcttcggcagctcgacgccgcgcagcgcgcagatgcggcgcaccacgacgaccgtcggcgcgccggcgtccacgacgacatcggcactctcgagatactgcggccgccgctccgaaagcagccgctcaatgaccgcccggcggtccggcacctgcaaaagcgggcggcgcctgtcgtttttcagcctctcctgcaaggccgcgagcggcacgtcgagaaaatagaccgtgccgccgcccgcgtgaaacgcctccacattttccgggcgcatcagcgtgccgccgccggtcgcgaccacgtaatccgcacgcgccgaaagtgcgcgcaccgtttcggtctcgagcgcgcggaaatgcgcctcgccgaacctgtcgaagatctcgcgaaccttgagccccgttttttcctcgatgtaccggtccatatcgacgaatttcatgccaagcgccgcggcgagcctgcggccgatcgtcgatttgccgctgcccataaagcccgaaagcacgatattgccgcgcaggcgctccctatccgttcccaatcctcatcttcctttcccgatgccgccagccggcatttaagcgaacagccgctttgtctcggcctcggcgtcgagaatcagccgctcgacgtcgccgtctgcaaaccgcgcgccgtaccagatttcgtgcgccgccacggcctgacacaccagcatgcccatgccgccgacagtttttagcccaaggcgcccggccgtgcgcagaaattccgtctcgccggggttatacacggcgtcgaacgccgcgccgcagcgggcgagcacactttcgccgacgatgcttttccccgcgttcggatacatgccgacgctcgtcgcgttgagcgcgaggctgtagcggcagcactcgctttcaagcgccgcatagtgcaaaacgcggaacacgccctctttcccgagccgcctgcacagcgcggaaagctcgtccacgagcgcgcgggccttttccatcgactccgcccggcaggcaaaatcgatctgcggcgcgtcggcggagagcacggcctcaaacgccacggcgcgcgccgcgcccccgcgcccaaggatcagaagccggcctgaaaaatccagtccgcagcgccgcagggccttttcgcagccgacgccgtccgtcgtgtagcccgtcatgcggccgctttcatttttgaccgtgttgacggagccgaacagcgccgccttttcatccaccgcgtcgagaaacggcaaaatcgcgctcttgtgcggaatcgtgatgttaaagcccgagagcgcgcgcagcgccggaagctgcgccgaaagcacgggcacgtccagcacgtcgtacgccggcgaaaggccggaaagcgcgaagaggcgcgcgtgaataaacggcgacattgtgtggccgatggggtgcccgatcacggcaaagcgggaaatatccatctgcgggtatcctttccggcacggaaaaaatttgcaattgcatattgacaaacaatccgtgcatcaatacaatgtaggtaaagtacatcccgattgtatcacgcctgcggcattttgtccatacggcaggtgggtggtacttgaactatattatataggaggaaaatgaaatggttctggagaaagtcattgaaattcttgcggatcagctcagcgtcgacccggcaatcatcaacgaggattccaatctcgtcgatgatctggatgcggactccctcgccgttatcgatctgatcatgtgcattgaggatgagttcaagattgaagttcccgacagcgaagtcgagaacctcaagactgtcggcgcgatcgtgcagttcatcgaagaccatcagtaatgctttcagcataacccggggcgggcagcgcaggctgtccgcccttcgctttctgcgcatgcgggcggaaaaaccggcgcggcggcgcggatttcccttgcttttcccgcccgcattcgctataataagcacagcacctcgaaaggattgatttctttggcaaaccagaaaaaaatggtggacgacatcacctcgatggacgtcgacttttccaaatggtacaccgacatcgtcaaaaaggccgagctgatggattattcgagcgtcaagggctgcatgatcatccagccgtacggctacgcgatctgggaaaacatccagcgcgagctggacgaccgcttcaaggcgaccggccaccagaacgtgtatatgccgctcttcatcccggagtccctcctgcaaaaggaaaaggaccatgtgaagggctttgcgcctgaggtggcctgggtcaccgagggcggcagcgagaagctcacggagcgcctgtgcgtgcgcccgacgagcgagattcttttctgcgagcactaccagaaaatcatcaaatcctaccgcgacctgccgaagctctacaaccagtggtgctccgtcgtgcgctgggaaaagacgacgcgcccgttcctgcgctcctccgaatttctgtggcaggagggccacacgatgcacgaaaccgccgaggaagcgatggcggagacgctcggcatgctcagcacctacgaggagttttacaagaacgttctcgcgattccggctgtgacgggccagaaaaccgaaaaggaaaaattcgccggcgcggtcgcaacctacacgatcgagccgatgatgcacaacggcgtcgcgctgcagggcggcacgagccactatttcggcgacggctgggcaaagaatttcggcatcacgttcacgggccgcgacaacacgctgcagcacccgtaccagacctcttggggcgtttccacccgcatgatcggcgcgatcatcatggtgcacggcgacgacaacggcctcgcgctgccgccgaaggtcgcccccatccagctcgcgatcatcccgatcgcgcagcacaagcccggcgtgctcgacaaggcgaacgcgctcttcgatgcgctcaagggcagattccgcgttaagctcgacgacacggacaactcccccggctggaaattcagccagtacgagatgcagggcgtgccgctgcgcctcgagatcggcccgaaggacatcgagcagaaccaatgcgtccttgtccgccgcgatacacgcgagaagattttcgtctcgctcgacaacctcgaggccgaaatcgaaaaagcgctcgaggccgtgcacaacggcctgtacgagcgcgcgctgaaaaaccttgaggaaaaaacctacacggcggcgacgctcgaggagttcctcgataccgcggaaaacaagcccggcttcatcaaggccatgtggtgcggcgacagcgcctgcgaggacaagctcaaggatatgaccggcggcgtgaaatcccgctgcatcccgttccacgaggagcacatcgccgatacctgcgtctgctgcggcaagcccgcaaagcacatggtattctggggcaagcagtattgattttccccgcggggcatcggcgcgatagagaaaacgaacctacggggctgccggaacttgccggcggccccgttttgcgcttctgtgcgccattgtgctgcaaaaagtatcagaattttttacagaaaagggctttacatttccccgcggatgggctaaaatgtagatgcaatattaacttacggcggatttctgccccttggaaatccgtggaagaattaggaggagaaatccaatggcaaatgtaagagttggcttcatcggctgcggcggcatcgcaaacggcaagcattttccgggcatggcacagcaggaaggcgtcgatatgtgcgcattctgcgacctcattcttgagagagctgagaaggccgcaaaggaatacggcaccccggacgcgaaggtttacaccgactacaaggagcttctggctgacccgacgatcgacgctgttcatgttctgaccccgaacatcgcgcactgcgagatcacgatcgccgcgctcgaggccggcaagcacgttctctgcgagaaaccgatggctgcgaccgaggcggacgcgaagaagatgctcgaggcgagagacagaaccggcaagatgctgacgatcggctatcagtaccgccacttcgcggagaatcaggtcgcgaagaaggttgtcgacgatggctggctgggcgacatctactatgctgaggctacatacctgcgccgccgcggcgttccgacgtggggcgttttcacggacaagtccaagcagggcggcggtccgctgatcgacatcggcacccatgcgctcgacctcacgctgttcctcatgaacaactacgacgtcgattacgttgtcggcacctcctttgagaaactcggccgcatcctcgatgcagagcatcagggtcaggtcaaccacagaggcgagttcgacagctggaacaacgagacctacgacgttgaggattccgctgtcggccacatcaagatgaagaacggcgccgtcatcaacctgcgcgctgcgtgggccatcaacatggctgaggactacggcgcaagcaatcaggcgttcacgatgctcgccggcacgaagggcggcctcgacacgaaggaaaaccgtgtccgcctgaaccatgtcgttgcggcacagccgacgatctcctgggtcggcaacaaaatcgagccgtacatcccgggcttctctcagggtccggctccgaagtccaaggaagccgacatttgggttaaggcgctgaagggcgagggcgagctgttcgtcaccgcagatcaggcttatgtcgtcacaaagattctcgacgcgatctatcagtcctccaagactggcaagccggtctacttcgattaattccatctgttcatccgtgtgcggcggcattccttgtcgccgcacattttctacagtatgaaaatgaaaggcggtttttcccgtggaaaatatcaatgttcaggtctattcgctcgtttccgagccgatcagcgccgttgaaaagctgcgcaccatcgcgaagctcggcttctccggcgccgaattcaccgcggacttcacgcaggtcccgctggacgaaatgaaaaaggtgctcgaggaaaccggcctcaaggtaaactccgcgcacgtcggcctcgaccagatcgagtccgtgctgccgtatttcgcagagctcggcgcaaagctcgtcatctgcccgatgacaaatttctgcaataaggcggaggcgctcgaggtcgccgaggagctgaaccgtctcggccgcatcgcgaagccgtacggcatcaagatcggctaccacaaccacaccgacgagttctacaaggatgagggcaaatacctctacgactggctgatcgatgcctgcgaccccgaagtcaccgcatttcaggttgactgcggctggtgcagcgccgccggcgtggatccggttgaatttatcaacagccatgcgggccgcatcgcgagcatccacatcaaggagaacggcggcgtcatcggcgcaaagcagccgcagtcccgctatgacacgaccccgcgcttcaagtttgagaaggatgcggacggcaacccgatcttcccgcccgagttcctcaagatgaaggaggagcacgacaagctgaacgtcccgcagggcgccggcatcgtcgattggaaggccgtgaaggcggcggcggacgcgcagtacgacggcgtgatctacgttgtggagcgcgaagccagctacaacgacccgcaggaccgcgtcgcgtgcctcgccgaggacatcgcgtggctcaaggcgaacctgtaaattttaaaattcggacggacggatgcggactgcatccgtccgttttgccgctgctctgaaaaatccgcttaaaacaccgaaaaaactgcggcgaaccgtctggaataggttcgccgcagtctttttgttacggagccgccgaggtttcagcagcctcctctttcgcctgtttaaaaaactcgttttgccgccgctgctccccgaaatgaaatttcggatgccggcacagccggaaaatccccgtaaaaggccgcgcgcgggccatggactttccgccgcctgccaagcggaaatccccgaaggcatctgcctccggggacttttttatccacatgccggcacaggcttcgtggaaaacctttaccttagtgctggatcttctgctcctcctcgtcgccgccgaagaagaacggcgggcgcgcctccttgtgcagcgcgatcagcgcatggtcgtagttgtgccccacggtgcaggtgcggtcgaagatcatcgtcgcctcgtcgtccgcggtgcaggccggccactcgggcagcgcgtcgctcgagggcttgccggtgcgcgcgaaattcagccacgcatcgcacatctgctgctcgaggcggtcggtcacgcccggctcgttgaacgccgcgacaaggttcgtattgtggaaaacaaaggggatctccgagcagtgccacgcgatgtgcccgccgtcgtacgggaaagtatagctgaacatataggaatacgtgccgctctccgggtgctgcgcttttttgtgcaggaactcgatcgacggcgcgcggaaaaccgagtcgaggaacagcaggtcgctcaggtccttttccggatacgcctccttgaacagggcggtcagcttttcggcgtgttcgccgtacatctttcggatgcgcgcctcgatccccgccgtatcggccttttcctctgcggaaagcgcgggcataaaggcgaattcgccgagcaccgtgccaaccatgaccggaatcgtcttggcgtgctccgtgaagccgacaacgcaggggtcgccgagataccagtcgttcggcattgggttgccgccgacataggcgccggtctgcgcgaccgcgggcatcaccttgttgtacgcctcggcaagctgcgcgtaggggatcgtctcgagcgcctccacatccgtgacgccgagctctttcatcagcgccgtaacgatggccgtgccgtccgtctttgtgaggtcgagcacctgatcgatgcagccgctctgcacgacgcccttgtggaacaggccgtccgccgccggggtctgcatcagcgtccaaaccttcatgccgccgcccgactggccgaacagcgtcacgttttccgggtcgccgccaaagcccgcgatgttctcgtggatccactgcagcgccgcaaccatatccgcgctgccggcgttgccggaattcgcgtacttctcgccgaacggcgaaagatcgagatagccgaggatattgaggcggtggttgagcgagacgacgaccacgtcgccgtagcggctcatgttctcgccctcataggcgatgtgctcaatcgaggagccagcggcaaatccgccgccgtgcagccagacgagcaccggctttttcgccgacgtatcgagcgattttgtccagatattgaggtattggcagttctcgtccagcggccagtagcggtgcgggaccatcagctcgttgttcggctcgtcctgatgcagcatcgggcagacatagccgtatgcgagcgcgttcttgatgccctcccacggcttcggcggcgtgggctgctggaagcgctttgcatccgcgtatttcacgccgtgaaacgcgtaaacgccgtcgagctgaaagccgcgcagcttgccggccttcgtctcaacgaccggctccgttttcgtgcacataaattctcttgccattcaaaatcacaactccttaaaaatggtgctatgctgtaaaccaattgcttacagtatagcaccatttcagcatatcgtcaaataattctttcatttttaagattatctgtagggaacgcacaactcagaggtagagatcggtcagcagcttttttccggttttcgttttgaagatgttgtcgcgcaccttgcgcgcggcctcctgctccatgccgttctcgaagatgttgacgaggaagtccgcctccacgagaatctggtaatccgcgccgtcgatatccgtgtacgtgtggtggcgcccgatcagatagcagatgcgcgcgcatgcctccggcgtgtagccgcaggccggcagcagcgccgccgcgaccggcgggccctccagctcctgctgcgggccgctgcacatgccgtatttttcaaagcagacgcggatgccgacgtcgtgcgtgacggcggcagcctctaaaatatcctgcgtttcgcgatccagcccctcgccctcggcaatcgctttcgcaaacgcaaaaaccttcaaaaagtggttgacgcgctccacacagccgtcctcgtattcgatcattttagcgatcagaccatagagattcgtcatgcttttttcctttcccggcatccgcaaggcacccggatgccgcccgttttttattccgcccgctttcccgcgaaataatcctcgcgcagcagggaatagaccagcgcgtcgtgcacagagccgtcgaaaatcgacgacgcgcggcgcagcgtgccctcataatggtagccgcacttttcgatgacgcggcgggagcggctgttgaacgcaaaatgccggatcgagacgacgtccatgcacagcgcttcaaacgcaaacgcggtgagccggcgcaccgcctcgggcatatagccgcggccccatctctcctcgcgcagcacatagccaatcatgcgcgcacgcgggttggagcgcaggctgtcctcatgcaggccgatggagccgatcacgcggccgctttccttttcctcgatcgcccaaacctccgggctttgcagccagctttggagcaccgcctccgactctttgcggctttcatgcggcttccagcccgccgccggcccgaccttcgggcttttcgcataggcgaacaggtcgtccgcgtcgtccatcgtccactggcgcagaatcagccgctccgtctcgagcgtttcctgcgggatgccgacccagtaccggcggatcagcgcgccgttttccgcgcgcttgtcctcgagcacgccgccgagcgcctcgatcgtccgcgccgaggctgtgtttccgtcgtcgcaggtgatcagcgcgcggctgacgccgagcgacttcgccgccggcagtgcgaggcggagctgcgccttggcataccccttcccacgctcgtccggcacgatgccgtagccgatatgcccgccgaattccatcaggtaatcgttgagccggtggcggatgtcgatgccgccgaggatcttcgtctccgcgtcgtccaccagaaagaagagcgtggcgggcacaagccccggcggtgtaatcgtgcgcatcttgatcgtatccgaaagccacgtgctataatcccggcctttcgggtcggatgcggcgggcacgatcgtctccgcgccccatgatgcaacataatccttgtataaattttccgatacccattcgggcagcagcagcttcatgtctcactccccgctttcccaaaacttaggatggccgcggcggcagcctactatacgccgccgtttatctgagcttcgccgcgagcgcaacccagcccttttccgagcgccggtcgatcagctcgaatttttccgcgaggcaggcgagcacgtcgtcctcgcgcgtgtcgatgataccggacaggatgtagaccgtgtcgggcttcatgaagcgcggcgcgtccttggtaagcaaaatcacgacgtccgcgacgatattcgccgccacgatatcaaacgtgccgctcaccttctccgcaaggttgccgcagatgccggtgaagcggtccgccacgccgttgacctcggcatttgcgacggccgttttgaccgcgagcgggtcgatatcgacgccgacggcgctttccgcgccgagcagcaggcccgcgacggacaggatgccgctgccgcagcccatgtcgagcatcgtatcgcccggcttcacgtacttttcgagcagctccatgcacagccgggtcgtctcgtgcgtgccggtgccgaacgcgaggcccggctcaagatgcagcacggcgcggccgcctgcatcgtactcgtcctcccagatcgggcgcaccagcagccgctcgccgaccgggatcggcttgaaatacttcttccagttgttgatccagtcctcctccgcacagttcgccgaggtgatttcgttcgggatgtcctcggccgcaaagcgctcctttaaaaaggaaaccgcctcggccgggttctcctcggggctgatatagacgtggatcacgctcttcgtgcggtccttttggagcagcgcctcgtcgatcagatcgatgtgggcgatttccatcgcctcctcttctaaatgcgaatagtcctcaatataaatgccgtagggcacgaccatctgcgcgatgtcgccggcccggtccgtatcctcggccggaatcgtcacggcgatctcggtccaatcggcgttcacctggctgaaatccgtcaaatcttccacgctcccatcgttagagttatatgtattatacaacgcggcccggaaacttgcaaggcaaacctgtgccgcaggcaggaggccccatgacaaaacaaaaattcctgatgcagggcatcctgctgacagccttttcgctctttctgcgcgtgacgaacatcggctaccgctcgtacctctccgccaaaatcggcgccgagggcatggggctttaccagctcattttctccgtgttcatgctggccgtcacgctctccacctccggcatcagcctcgccgtcacgcgcatggtgacggcggctatcgcggcaaaccggcgcgggactgtgcgctccgtcgtgacaaagtgctttctcttctgcctgaccgtaagctgcacgatcgccgtgctgctgctcgttttttccgatttcgccgcagccgtgatcctcggctacaagggtgcggcgggcagcctgcgcattctggcgctggggctgccctttatgtcgctgtgcacctgcatgaaagggtatttcctcgcggtggacgaatcgctctccaccgcgctgagcgacgcggtggagcaggtgctgacgattttcgcggcggtcgcgctcttctggtacttcgcgccgcagagcatcgagaccgcctgcctcacggcaatgctcgcctccaccttcggcgaggccgtttcattcctctcggggtgggccgcctaccgccgcagcctgcgccgcaacacgccgaaaaaggccgagccgggccgcggcgttctgcacggcatgttccacatcgcggtgccctgcacgctttcgagcgcggcgcgcagcatgctctcgaccgccgagaacctgctgatcccgcgcgagctcaagcgctgcggcctaagcgaggcgcagtcaatggcctcctacggccttttgcagggcatggcgatgccgatgctctatttcccctcctcgttcctctcctcgttcgcctcgctcctaattcccaagatcgcgcgggaattcgagcagaagcaccgccgcgccgtcgcccacatcacggaaaaggccgtcggcgccgcgctgcagttcggcgtgttctgcgccgcggtctttttcgctttcggcgaggactggggccgcgcgttttacagcagcgcggaggcgggcggctaccttaaaatcctcgcgccgctcgtgccgctcttgtacctcgacgtcgttgtggacagtcttttgaaggggctagacgagcagctcaactccatgaaatacaatttcaccgattcgctgatccgcgtgctgctcgtgctgtgcttcatgcgcttttccggtatgccggcttacatcgcgattctgttcttctcctcgatcttcaacgcgatgatgagcgtgcgccgcctcctgaaggtcgcgcaggtgcgcgtccgcgtcgtgaaaaacgccgttctgcccgctttttacgcgctgctttccgccggcatgacccgcgcggcgctcgcgccgctgccactctccggtatccccctcgtgctccttgaggccgcgctcgccgccgttttcttcctctgcatgcgggcgctctccgaggccgccttccaaaaagccggcggcaaaaaagcggccgcctccaagggagacagccgccttgcagtttccgagcggacgatcagccctttacggcgccgagcgtgatgccggaaacaaagtatttttgcaggaacggatagacgatcagcatcgggatcatcgcgatgaacaccttcgcggcctcgagcgccttgttggaattcttcgcaagctgctggtactgctcggtcgtcagcgtgacgttcgccgggatctgcaccgtgatctggcggatgtacgtctgcagcggatatttatcctcgctgttcatcagcacgaggccctgaaaatactcgttccaatagttgaccgaggtgaagagcacgacagtcgcaataaccgggacggagcacggcacgacgatctgccacaggatacgccacggaccggcgccgtccacaagggcggcttcctcgatgtccgcgggcaggttgcggaagaagttcatcagaagcagcacgttgaacaccgggacggagcccgcaaagatcagcgccgcaagattatcgatcagcccgtacttctgcatcgtgatgaaccacgggatcgtgccgccgttaaacagcatgcagaacacgaggacccacatcagaatcgttctcggcttgtactctctggatctcttggagagcggatacgccatcataatgatgacgaccatggtccagatcgtgccgaacacgacgcggccgacagaaatcataaacgaattccagaacgcgccgtcgcccataatcagctcataagagccgaagtttacgcctaccggccagaatgtgaccgcgccgctttccgccgcgagcttatcggaaagggatacgcagagctcataccacagcggatacaggcagctgattgccaaaatcgtgaggatgatataatttacgactttgaaaactctggaaccgacggttttggtttcaaccataaaaatatctctcctctcttagaaaatggtgtaatccgcaaacttgtacgcgagcgtgtacgaggtgacaaccagaatgaagctgaccaccgacttgaagaggccggccgccgtggacatcgagaactgcaaattgacgagaccgaggcggtacacgtacgtgtcgatgatgtccgccgtttcgagcacgatgttgttgtacatgttaaagacctgatcgaagccggcgttcagcacgttgcccatcgcgagcgtcatcagcagcacgacggtcgggatcaggcccggcagcgtgatgtgccaggtggactgccagcggttcgcgccgtcgatcgccgccgcctcatagaggctcaggtcgatgccggtgagcgccgcaaggtaaatgaccgcgttatagccgaattccttccacacatcgctgcccaccagcagcccctgaaatatagaggggtccgtcatgggcataaccgtcggctgtccgagcgccttcaaaaccgtgttcaggatgccggaagcgccgagcatgtttgtgatgatgttgccgagcagaacccacgaaatgaagtgcggcaggtaaacgatcgtctgcacgctctttttgaacttcatgtttttgatctcgttgagcatcagcgcaaaggccatcggaatcacgatgttcagaataaccttcgaaatcgcgatgatcagcgtattccacagcgcgcgctttgcgtcgggaatcgcccagagaaactcaaagtgctggaggccgacccagtcggagccgaaccagcccttgctggggttgtagttctgaaaggccatgacgataccgaccatcggcacaatggaaaacataaagagccagatgtagccggggatgcacatcagcgtgtagtggaaccacaccggaagactttttcttgtttttgttttttccaaagcggattcctccttttttgtaaatagcaggggcgcagggtttggtgccccgcgcccccgctttccggttttattctcgggttttactaattactcggcgaggaaatcttcgacgagctggaggatctggtcgccgccctgtgcatgccagtctgcgcagaactgatcccaatcgtcaacgctcttcgcgccggtgatcatctggagaatcgtctggtcctcaaggtcggaaacctgcgtccagtacgcgtccatgccgtcgatcgtgtagtagagctcggaatacaccttgttgtccggctcaatcgtcgcatacgggcggtcgccgacaagcagcgcgtagaaacggttgaactggccgttattcgtatttacatcacagtctgtgacgtggaggatctcgttcggatcataatcctcggaaatgacctctctgagcgtcgccgcgtcattgcccatattcttgtagagcgtggtgtacttgtcgccgccgatctgatattcctctgccgcggtctcacccttgaggatgctcatcagcgcctcatactcgtattcacattcgtcggccgccgccatcgtgttgcgctgcgggtaccagccgatcgcaacggaggtatcaaaggtggattcgtcgcggacaaggacgttgttcgcaatgatcgccgcctgcttcacttcttcggaggcattcttgttgatcatcgtgtacgtggtgccgacgtctttcatgtggacgttccactcgccgtcgttcgtgtaaagcgggtatgcctgccagtcggccgtctcgtcattgcggaaagagtcgccgttgccgtagcccatctgccaccacgggcccatgaagatgccgcaggtgccgttcttgacctcgttcgcgttgtcgccgttcgtcgtgacgccgatttccggattgatgaggccctgcttataccagtctgccagctccgtgacagccgccttcatctcgtcggtcgtggtgccccagtagagctcaccgttctcatcgcggaggaaataacccgggtatgcgttgaacgcctgatagacagcgtcaaaaccgtagctcgtattggaggagttgaggaagttgccgtacgttctgccgccgttgtcgatgccggcgatcgcgtactccggcgagaagccggcttccatgaaggcctttgcggccgcctcgagctcgtcgtaggtcttcgggacctcgatgttcagctcgtccagccaatcctgacggatgaagtaaatgttgacgccgtcggtgtcaaccgtgatgttcgggatcgcgtagaacgtgccgtccacggtcgcattatcgaccgctcggtatgtaccgctgccgtcgtccgtcgtctccacgatctgcttgacctgcttcgaggaatactcgttgaaggccggccagagatcggcgaggaggtcggcgcgggccgcctgcacaaggtagtttctgtccggcgcgatcacgctgtccggcagagaggcggaggcaatgccgagggagagcttctggcggaagtcggagacgttgcccgccgtccactccatgacatacttgatgttgaagttttcttcgaggtatctcgtatactggttgttgtcgactgaatcattttccggcagcgtggtgtctaccggatcgacctgctggccgaaagtgatctcgacgacctcgtcaaattttttaaacgcgcggtcgtccgtcttgcccggctccgcgtcgtccgcaacgtctgtggaaagcagccattcgctgccggcagcatcgccgccgttctcatctgtagcgccgtctgtagaggcggagctgtctcccgacgcggagctgccgtccgtcgtggtcgaaccgctgtttccgcaagctgccagaccggcagtcattgccagcgccagaagcgccgcaataattctcttgctcattggtatttcccccttgaaaatgttagcgcgcagcggcgcgcattttttctgaacaagacgccattgtattctgcttttgcagaatacacaaatagagtgcactctatttgtggctcttgtatttgatgaccatatattaacatatagttcacgatttgtaaagacctttttcggaattttccctaaactaagtcaaataaatgccgtgtgaatgagacggtttatacaagattcagttgtattttcttgtgaaaccgcttccacaatacaacttatccaataattcaaactgaaatataaatattctgcctattccatcgattttcgacacagacggcaaaagtccccgaaggccgcggccccggggactctttcaaaccgtattcgcttttaagatcagatccagcgcgtttcggtcatcttcggctcaaacacgatgacggacttgagcatctcgacggccttctgcaggccctcgttctggctcatgaggctgtcctcatgctcgatgctgatcgcgtagtcgtagccgaccatgcgcagcgcgctgatgatgtccttccaatagagcgcgtcgttgccgtagcccacgctgcggaaaatccaagagcggtggatctcgtcgccgtagctcttcgtgtcgagaacgccgttcttcgcggtgttcgccgcgtcgatgcgcgtatccttcgcgtgcacgtggaagatcgcgtcgcccatctcgcggatgacagtgaccggatccataccctgccaaatcaggtgggacggatcgaagttcgcgccgatttccgggccgaccgcctcgcgcagcttcatcagggtctgcgtgttgtagacgcagaagcccgggtgcagctcgagcgcgatcttattgacgccgtgcgcctttgcgaacgcgacgaactccttccagtaatcgatgagcaccttccactggtactcgaggatcttgccgaaatcatccggccacgggcaggtgacccagttcggatactgcgaggtctcgctgtcgccggggcagccggagaagcagttgatctggtgcaggccgtatttttccgccatgagcaccgcgttgcgcatgtccttgtcgaacgccgcggccatttccttgttcgggtgaaccgggttgccgtggcaggagaacgcgctgacctccatgtcatacttcttgataaggccgcagaattcctcgaacttcgcttcgtcgttcagaagcacctccgggtcgcagtggtccttgcccgggaagccgccgcagccgatctccaccatctggatgcccatcgacttaaagtatttgagggcttcctcaaacggcatgttgccgacgacattggtaagtacacctaatttcatgctgaacactcctttaaaatagaaaatataaatttagtataaacagtatgtcctgcggatcagcatccgcgcttatctttattgtacaatatgttttcgccgaaatcaacagagaattgcggtttatgcgtgaaaaatcgttatagattccgtcagaaaagctgtagcaatccggccggcgatcgattataatagggtacgatgttatttactgaaggatggtacacctatgccggaacaaactgcaagcaattttaaacgcacggtgttcgcctgctaccgcggctatatcacgcagggcatcgtgaacaacctctccccgctcttcttcgtcatttttcagaaccgcttcggcatctcctacgggctgatctctgcgctgattctctgcaacttcatcacgcaggtcgccaccgacgtgctcgccgtgcgctatgtggaccgcatcggttaccggcgcgccgccgtcatcgcgcattttctcgcgtttttcggcctgatgatgatgggcattctgccgaacatactgcctgcgccgtacgtggggcttgtgatcgcgacaattatcaacggcgtcggcggcgggctgatcgaggtcatcatcagcccgattgtcgaatcctgcccgggcgatgcaaaggcctcggccatgagccttctgcactcgttctactgctggggacaggtcggcgtcgtcctcgtcacaacgctgctgctgcgcgtgatcggcgaggatctctggttcgtgatcccggcactgtggtcgctgctgccgttttacaacctgttccgcttcctcaaggtgccgctgatgcccaccgtgcccgaggacgagcggatcccgctcaaaaagctctttgcctcgaagatcttcctcgtcgccatgctgctgatgctctgcgcgggcgcaagcgagctcgccatgtgccagtggagctccctgtttgcggagcgcgcgctcggcgtgagcaaggtggtcggcgatttgatggggccgtgccttttcgcggtattcatgggcatcggccgcacgatttacggcgtttggggtgaaaagatcaacctttcgcgcgcgctggcgctctgcgcggggctgtgcatcctgtgctatctcggcacggcgctgtttcaaagcccgatgctcgccctgctctcctgcgcgctgtgcggcttctcggtcagcctgatgtggccgggcaccttctcgctcaccgcggcggcctacccgaagggcggcaccgcgatgttcggcgtgctcgccgtgctcggggatatcggctgctccgccggccccgcgctgatgggcgccgtgagcgcggcggtctcctccagcgcgaaaatgcaggcggcctttccgggcctcaccgccgaccagctcggcctcaaaagcggcatgctgttctgcgtgctgttcccggcgctgattctgctcggcatcttccttttaaaccgcttccgcaggcgcgagcgcgcggaaaatgcggaaaacacctgaacaaggcccgaaagcccggcgctgccgccccgtttggtgcagcgccgggcttttttcattatatatcattttttacagacagccgccggaaaacggtttagaataagcgcagtactcaggcggtgcaccgtcgtccagcgtttccagcgagcaggaggcgcgcagcccggcgggatccagaatctcgatgcgccggcgctgtgtacggaggatcccttcctcgcggagctgcgcgagcgtccgggccaaattgacgcggctcatgcccagaatatcggagagctcgtcctgcgtgacgtccggcaggcgctgcggatccgcttccccgccctgcagcaggtagagcaggttgcaaagctggatgcgcgcgctgttaaattcctgatgcgccgcgtcgtacagaagcagattgacgtaggtggcgtaccagtcgagctggatgcggcgcagcgcggcgttctcctcaaacatcgccgcgaactgcgcgcgtgtgaactccagcacctccatttccgagacggcacgcgtgacgatcgaccgctcgatccggtaatcccggccgtggtatcccgggaacaccgtgccgcgcccgtggaaggagaggatcctgcggcgtccgttttcgtgctcgatgtaattctgtgccacccccgaaaggataaagtgaatgcgggcgaacggctcgccgggcagccagaggtaatctcccctgcggatctgccggcgcacgtgcggccggctctcaaagtagccggcaagctctgaaaaatcatcgtgaaaaaagtagcgcggcgtcagcatgcgcaccgcctcccttcgccgggctctcacagggctgcgccgccgcccgcagcacccgcaaagcccgctccttttttgatattataccataccgcggcgggcacttcaacacgccggattacgcagagccgttcggcccgcgttccatctatagatttacaaaaacaggcaaaggagctgcaattatgaaacacaaatgtaagatcacggtcatcggcaagaaatgctacgcggatttgcaggaaaaatacctcgctgacccgaaatccggcccgtgcccgatgttcgaggtcgggcaggaattcatcctcgagcgcgacggtgagcgcgacgatttctggcacatgctggacggccgcttctgctctgaggcatgggactgcgtgagccgctacgtctatgccgcgctgcagggcggctcgatcatgcgcggctggacaaacgacgaaaggatgatgatcgcctgctgcaacgacggcacgcgccccgtcatcttcaagatcgagcgcatcgatgaggcggaatgagcgccgctttctccgtgcagaagcgcctttctctctgaaagaggccttttatatcagggctttcccgccggttttcaaaaagaaggctgcgccgctgaatcggcgccccgcaagaaaagtaaaaaaattgatcggaaccggcgtgttaaatcacgccggttccgattcgtttaaaccaagcggaactaaactgatccgcttaatttgggataagggaaataaaccgtgattgtcgggcaattaaggggtgtattcctgctttgcggggattaagctggcctgcactcatgtgttcagcggaaataaaattttaaggaaggcccgttctgcatagcttgtgctgttaaagttaaaataacgccgagccccatgtccatcatataattcgaagtcatttggcgatacttgtatggtgtatttcaaattctgcatcgtggtatgcagcgaaagctcccattccgtcctgttcgatacagcggctttagaaatggtattatacagccattcaaactctgcgtaatcaaagccgtttttcagaaaaccagtccaaagaataattttctgctgaaaggtgagtatccgcagcatatcttcaggctctatttcctcaaagacactgccataacaaaaacagctgttttgtatcggcagcgcaaggttttcttccaacaggaacgggccatacttccagtccaaggctgccgctccgcttttccaatttgctgcggcaatcaatacatacaaaacttctgactgcgcagaggaaaggcactggattctcaggcaaagcgactggatcgtatcaaccggacggcccgaaagcgttttctgaacgccataaacgcggcggtctgcttcctccaacgctaaccataccgtttcttgagaagaatcttccatgccgaaaatgtcgattttccatcttgtgcgaagcaggacgagatccatcccaaacatctgcaaaaaatcttcctccgcaaaagcaacgtcatcaaaccagacataaaccgcattggcttccccatcttcgtgccggtatgccgaaggagttgtttgaatccattgacttattctaaataaaaatccaaacaaatcgcaggcggatacgttttcttcatcgtctggagatggaatttccgttgctttggcttttaaaaaggaatgcatctccatcatagcagctttctcccttccgttatatgaggcccatcttttgagcaatctcaatgttgaccatcaatacattgaccgtttcttcaccgaaaataccaaggatcttgccgtctgtattgtttttgacaatatcccgaaccgtgtcttcgctcagaccggatgcttctgcaattctgggaatctgaacttcagcggattccggagaaatgtgaggatccaagccggaaccggaagcggttaacagatcagtggggatatcttcacgcttaacatccggattcttttcaagaaaagcctgaatatccgcttcaacacgttcgcttaaagcgggattggaaggagcatagttcgccgatccggaacttaagcccgcgaatctggtatcggccgcttcatcaaggttctcaatgtttttgtagaacacctgattcccgtcttcatcaaaggtatcataatgggcttttgtaacattgccgtctgcatcctcttcatcaacaatgaaaaggatctgctgatccgcctcatccttcgtcacataatgctgaactccgtctttatcttcgacatatacgttatagccgtactgggacggacggctccacatgtagtaatcttctgtaaatttctgtcctacatatttggcgcccaccgtttggccgtttacggtaatgagatttccacccgcttgatccggaaaaatcaaggcggataacccggttaataagcacgggaacagaagtccgcaaatcagcattaaaacaactgtgactataactgcttgacgcgtgccgtgcaggaaatttttcactgattctttcatcgtacaagcatcctttcttaaagtccaagaccaattaaagacagcagaggcgcaatgatcatatcaataattttaattccgataaaaggagtaaccacgccgcctaagccataaataagcatatttcttgccagcatttttcccgaagataccgggcgatatttaacgcccttcatggccagaggaatcaggcacggaatgataatggcgttaaaaatcaacgcggacaaaatagcgctgtatggtgttgtgagattcatgatgtttaaaatttgcagctgcggaatagccgacataaacatcgcaggaataatggcaaaatattttgcaatatcatttgcaatggagaaggtggtcaggctgccgcgggtaatcagcagctgcttgccgatttccactacctccaaaatctttgtgggatcggaatccagatcgaccatgttggcggcttcctttgccgcagtagtaccgctgttcatagccaaaccgacattggcctgcgccaaagcaggcgcatcattggtaccgtcgcccgtcatagcaacaattttgccctcggcctgttcctttttaataacatcgatcttatcttccggcttgcattctgcgataaatccgtcaacgccagcttcttttgcaatggtagcagcggtcagcggattgtcaccggtacacataatggttttgatgccgattgcacgcagacgctcaaagcgctgcaccatgccgggctttacagtgtctttcaaataaatgacgcctaaaacccgattatcctcacagaccgtaagcggcgtgccgcctaagctggaaattttatcaacttgttcgtgcagatctgaaggaattacccctccaagtgctttcacatactgttcaatggcttctgccgcacccttacgaacctttgtgccatcggggagatcgacgccgctcatccgagtttgggcggtaaattcaataaattccgaaccagccgtttcttcactgttatcacccaaacggcgggcaagctccaaggtggattttccctccggggtttcgtcatgcaggctggttaaagccgcacaccgaatgagatcgctgcggtttgcaccgcctaccgggaagaaatccgctgcaaggcggttgccatatgtgattgtacccgttttatcaagaatcatggtatccacgtcgccgcaggcttccactgctttgccggacatagcaatgacattaaaacgagtaacacgatccatacccgcaatgccaatcgcagaaagcaggccgccgatggtggtgggaatcaggcagacagccaaggcgatcagcgtggaggtttgcagctgcacgccggaataaatgccaatcgggtacagggtgacaatgacgatcatgaaaatgatggtcagagaaaccagcagggtgttcagcgcaatttcgttgggcgtttttttgcgggacgcgccctccaccaatgcaatcatgcggtcaagaaaactgttgcccgcatcggaagtgatacgaattttcagccagtcggatacaatcgtcgtaccaccggtaacggagcagaagtcaccgccggattcgcggacaacgggagcagattcacccgtaatggcggattcatcgacggaagcaataccctcaatgacttctccgtcgccggggatgatttcaccggcagaaaccattacgatatcgccttttttcaattcactggaaagaaccgttttctcggtaccgtcctccatgagcagccgggcgttcgtatccttctgcgtttttttcaggctcgccgcctgcgccttgccgcggccttctgcaacagattcggcaaagtttgcaaacaaaacggtaatgaacagcactgcgcagacgatgatattataaactctcaagtttgtgccatcgctgatatcgccgaacaatccggggaaaaaggagaggagcagggtaatgaaacagccaacctccaccacgaacatgacggggtttttcatcatgtatacgggatttaattttgtaaaggagccgataatggcctgacgaaatatttcaggcgtaatcagcttctgattttttttgctcatatatgttcctccttatgcccaaagggtcaaatgctctgcaattgggccaagcgcaagcacggggaaaaatgtcagtgctgcaaaaatgtaaaccacaaataccaaaatcaccgcaaagctgaaagtgtcggtatgcagtgtaccggcagactcgttgacaaagcgctttttcatcagagatcctgcaattgccagctgaataacgatggagagataccggccgaagaacatagcgagtcccgttgtaatattccagaacaaggtgttatcagccaagccttcaaagccggaaccgttgtttgcggcagaagaagcaaactcataaagcacctgagaaagcccgtggaagcccgggtttgtaatgccctcaagtccggccggtgttccaaccgccaaagcagagaacgccagaatcagcagcggatggatgatgatgcacagcgctgtcagcttcatttcccggccttcaatctttttgcccagatattccggtgttcggccaatcatcaggccacagataaataccgccaaaatcgcatacatgatcatgttcatgagtccgacgcccttgccgccaaacacaacgttgagcatcatgtggagcagcgggatcatgccgcccaagggggtcaaggtatcatgcatgttattcacagtaccggtcgtaaaggatgttgtcgtggttgtaaacatcgcagactgtgcaatgccaaaccgcacttccttgccttccatactgcccatagactggcttaaaccagcatctgcaagagccggattcccttggctttctgcccagaagcaaacggaaaggccaatcaggaaaataatgcccatagcggcgaaaatgctgcggccctcacgcccatacatccaaactgtaaagctcttgcggatcttcccctgagccctatccggtttttcctgtgccatttcgcgcttgcggtcgcgcaccattttgccaaaggtgataacgcaggcgcccggcagaagcatcatggaataaagctcaatcagattgctgattatggtcggattctcaataggcgtgctggagtttgcacccaaaaagccgccgccgtttgttcctaagtgtttgataatttccaatgccgcaacaggtcccatggcaatgatctgtttggcgccctcaatggtatctaccacaacattgccggagaagttctgcggaacgccctgccataccagcagcaggccgccgacgatagaaaagggcagcagcactcttgttgtgatacggaccaaatctgcgaaaaagtttcctacattgtctttcgttttcccagccaaaccgcggatgaatgcaacacaggcagcatatccgcttgctgcggaaacgaacatcataaatgtaatgaccagcatctgagataagtaggacagcccagactcgccggaatagtgctggagattggtgttggtcatgaaactgatgatcgtattgaaggaaagggattcctccataccgccgattccgttgggattgaaaagagcgatactttgaattcgcaaaataatatatcccagaagaatcattacgccattcgttgcaagcagagccaacgcgtattttttccagttcattccatttttcggtttaatgccgctgattttatagataacaccgtctacgcggtcaaaaaccgggtcggcaaaggtatgttttccagctgcgatatgataaacataaatgcctactggaattaccattatcagataaaggataatggtcaatataatttgcagcatgctgattccctcctgctggttttaaaatttttccgggtgtaccaatgcataaactaaatatccacccagcagtaaaacaataatcccaagaacaatcatgtcctttcctccttattcatttcgatctacttgcttttggcaccagttgattaacagcacaacaagcccaatacagccggccaaaattgctaccatgataagatccatcatattattagcctcctcttagcttttctcgaaatattgtagcagttttatcgtgaaattggtcttagcgttttttatatcagataaaaattgtattaagaaagcgcctgacctgatgggcgtcagacgctttcaaagctcagccggaatcctttaaaatacgaagcgccatctcgtaaatgcccttccgatataaaacaagggtgatttgcatttctggatgtctctcttcaaatttttttattgcctgttccgcaatcgcaatagattctgcccgaggcatatggctgtcaccggaaaaaatcagcggaacggcgatgcttctgcacccaatcagataccctctctgcaatgcgttaaaatagcattgtgccattaggattttttctcttttattgcccccataccatccggctccggcaacatgaatgatgtattttgctttgagtccgcaagaaggggttgccaccgcatgaccaatcctgcaatgtccaatccttttacaaaccattttcagcaattcactgtctgctgctgcataaatagcgctgcatattcccggatgcggcattaaatcggcagaggcggcattgacaatggcatctgcctttatttttgtgatatcgccgagtattacctgcataaaaacctccacaagtttacattaggaaaccgcacagtaaataacctgccaccgagaatcctgcggcacacattgcatagggaagctgtgaaagcgcatgatccatattgttcattttgcagcagctggatgttaggaccgttgcatccgaataaaagcaggcgtggctccccagcgtagcgcccgaaacaattgcccccataatcagaagaggattggcgccaatggaaaaggccaaaggaatgataatagggctgacaatcgccggaatcccccatgcgctgcctgtgctgaagtttagcagggcaacaagaagaaaagtgataaccggcagcagctgtgcattgataaggggctttacactatgaatgatataatctgcaattccaatatcgctcatgccctcctgcatgacaaatacaaagaagataatagcgacagttggaatcatattgcaaaagccatgcatgactaaatcacaaaaatgagaaattgtcatctttttacgggggatatacagaagaaaacagactgctattgatgcgatcaaagctaaaaacagctctcccattacaatcgttaacgtaatcagaacgccaatcggcaaaacaaaatcccaaatattcccttttacgttgatatcttccgcatcttcttcgtccaaattcaggtctgcgctttctggggagtacacctttccagtgctctgcacccggttatacgcttttttcatttttccccattttggaatcaggccaaacccaaacaggggaacaattacaacggctgcaactgcataaaaaacaaaggggataatatggtagaaggtttcaatcgcactgccgtatcccaattcgggaatacctgcttccgcatagaataacccggcaaaaaacaccgcccatgttgaaaaaggcaggagagcacagacaggcgcgcctgtggaatcgataacataggaaagcgcttcgcgaggaaccttatgcttatctgtaagctttctcatacatgtgctcagcgtcataatattgagatagtcgtccacaaaaatcaggacgcccataacccacgttacaaacattgtggacttttgacctcggcagagttttccaagcatctttgaaaaaccaagcgttccatgcgatgctcccagcaatgcaatcaggcttccaaacaaagcacataccaatatgacccactgatggtctctgtctgtagcaacccggaagaaggcatccatccaccctgaagcgaaatcaaatccgtcaacaatgatataagtaataaaggttccaacaacgagcgattccaggattcttttggtgattagcgacacgccaattaccacaactattggaagcaaagttaagataccgtattccatatcgacccctctgttctatgaaaatctgtcttaattatatctcgaatagaattagagggagataaagccctgccggaatacattaagtttttgttaatcgatatgctgcgtgcattttcggcttagatttttcatagatccataatccatttggaaaatagaaataacgttgtccgtcttttcataaacggacaacgttatggagaaatcttaatatacaggcatttctgttattgacgtatcattcgataccctacgccgatatgggtttgaatatattgcggcgcagaggggttttgcccaatctttttccgcagcgttgccataaatacccgcagagaaggcgtatccgatgcggatgtgcttccccatacttcttttaaaatataattatgtgtcaaaacctttccggtatttttggcaagaacacaaagcagtttgtattcaatgggcgtcaaatgaatctctttatcatccatatatgcgcatccagcggcaaaatcaatggccaggtctccgttgcggtacacactggtttgtacttgggaagaaacctcatctgcccggctccttcgcaaagccacgcgaaggcgggccaaaagctcatcaatgctgaatggttttgtcagataatcatctgccccggcatctaacgcttctaccttatcctgatcctcgcttcgggcgcttaccacgataataggcacattgctccatccgcggattttttggatgatttcaacgccgtccatatcgggtaatcccaaatccaaaataatgacatcggcgttataggaaacggcatccaaaagtgcacctgttccatttttcgcggtgtgatactgatacccctgtgtatccaatgtggttcgtatcaaatttgtaatagcaggatcatcctctatcacaagaatctttgacttatacatgatcaaaattcacttcctctaaaggtaatgtaaacgtgaataccgcaccatgcggtttattattgctgacagaaatttttccgccatgcgcgtctacaatagatttgcataagctcaaacccagacctaaccctctgcggctgtctgcttttccgatatccgccgtgtaaaacatatcaaataaatgcagctttgcttcatctgaaatgcccggaccatcgtccgcaatgcggatgagaaccatttttttctcctttcgcgccgataaacagatgtgggagccttccggcgtatatttaatggcgttgtttacaatattgatgatcacttggacaatcagacgaacatccattttcgccattaaaaaatcatccgcaagctctatggatatttcatgttcggacgcttttcggtctacatgagagatcgcctcccgaaacacatcatcgatcagttccgcattcatctggagatgcatggttccattttcgattcgcgtaatagacaatagattctctgtgaggtttacaagccacatggaatcgtcatagatagagctgtatatctcctgttttttgctttcatccagcgaaatacttttttccattaaaacgcctgcatttccgctgatgctggtaagcggtgtgcgaaggtcatgggaaattgcccgcaataaattggagcgaaggcgttctctttgcgtttccatttcaatcgcttgtttctcagcccgaagtcttcggcgttccaaaatcaatccgcattcgttcagaagggaaatcagcaggtttttctcaaatacatccaatggaggatagtattttgacgggattccgatcacgcccataacttcctgatttcctctgacagacaaatatagattctgtgcatgagacagcgtgtttgtggttgctccggcacgcttgttgttttgtacgacccaatcagcaacgcccacttcttccggggtcattgccccaaccaatttatttgtttccgactggggacaaacctgaaattccagcgctttgccttttatggccagcgaatacaaaaccggccgatccagaagcgctcttacctgttccgctgcaagcgcaataatttcctgttcatcgcgcccttgctgcattttttgactgctgttcatcagaagctccatatagtaagctttttgagcagattgacgcgcttgtttttttacccgcgttgccaatgaactcgaaataacactggccgccagcataatcaagaaggtaaccggataatcgggggcggaaacctccaatgtaaaccttggcgcagtaaaaaagaaattgaatgcgatcacgctgaacagcgacgcgagcgctccgcacagatagccatgcgtccaaattgccgtgagcaggacacccaaaatatatacggtgatgatatttgcttcccgcaggccaacggcataaaatccaaaactgatgatcgttgcagaaagcgtgatcagcacaactttcagcagatcagtccacctgaatttcggctcctcttttcgaagcaaattgaattttttcttataaagcggctgtgcatccggaatgatataaatgtcgatatccccagccaatttcgtcagcttgtcggctaacgacttactttttaaaagtattgtggatttgtggttggttcttcctaaaacaatttttgtaataccgctgaccttggcgtattccgcaatttgcacggccgggtcatcaccataaaccgtagcaatttgagcgcctaattgctctgccaaacgaagattatccctcagtcgctttaagctgtcgcccttcaattcttttgtttcgggcgtttcaacaaataaagccgtaaacccactatggaaggcctccgccatgcgggccgcggttcggataactttggcattggagggggagctcgaaaggcagattaagatgtgctctccggctttcgcaaccgcctcatttccgcttttttgagcattccggcttaatcggtcagccgtgcgccgcaaagcaatttcacggagcgcctctaagttatctcttgtaaagaaatgatcgagagcacgggacgcctgatttttgcgatacacctttcccgactgcagccgggaaatcaaatcgtccggttcaatatcaaccagctccacttgatctgcagaatcaaacacagagtcgggaatccgttcactgacagcaatctgtgtaatagatgccaccaagtcgttgagggattccaaatgctggacattgaccgttgtataaacatcaatacctgcccgaagaagctcttccacatcctgatagcgcttcgtatgacggcatcccgccgcattgctgtgcgccaattcatccacaagcactatttggggatggcgtttgagcgccgcatccaaatcaaattccttgagtttaattcctttataatcaatttctttgtttggaagctgctctaacccttcaagcagcgcaagcgtatcgggtctggtgtgacgctcaatatatccaactacgatatcaatcccctgcttttgcgcctgatgcgccgcttcaagcatagcgtaagttttccccacacccgccgcatagccaaagaaaattttcagactcccttgtttttgattgttttcatttcctttatgcgtaacttccattttttccaatatagcatcaccccacttttctgttttctattataccatattgaggcttttggcgatataaaaaagaaacccaagatattaaaattgtattaagatctgaaatctcagacctttagtgaaaacagatattctctaacgccgtttttcatgactggcgatattattcattagaaaacagtaaatccgttctttttctgcgccccggcaagcaggacgaacagcctccgccaatctgtctgccatttcccgccaaatcaagtacagctaactttccatgttaccgccgccttccctcttttcctaaaaaatcctttagcttttgaaaagcccctgcacctatagcatgttcaatactgcaagcgtcatgttcctccgtttcacaatctgcgccggcgcggccgggcgcacatcacaatcagaacagaacaagtcattttcagaacaggttttgccaaacgcagcgtccccgggctgtgttataataaactgaaagaaaaagccgtgcttttctgtgaattttgccggggaggtctgcctgtgaaaaaaggactttattccatacgcaagctgcagcgcattatgattttcctgtttctaatccccattctcgccctgcagctcacgcagagcctgctctcctttcaggagctgagctcggagatggaggaaaacgggagaagcatcatctatctctatcagcagcagatggacagcgacgtgcaccgcatttccaccaccatcgcgaactactgggcgcaggaatacagccacaagcgcctgctctacgcacagagcccgctggacgcttacaagtacgctttcaatgtgctggacacctaccgcacgctgatgaatgtggagccgaccgtcgccgccatttttctcgtctccggcgccaacgacatagtgcggggcgcctttacaacgacccacaccacctacgaggagcgccttgccatgcgcggctatgtcgatggccttgcggagagctggggagaaaacagcccgcggcgctggcggcccgtgcagctcgccgggcggtattttctggtgtgcgatttctgcacgcagtccgccggcaccgtctgctttatcgatctcgatcagatcctgagcccgcaggcctccgcctcgctcacacaggatacgcggctcctcttcgcagacgaaagcggaacgccgctgtccgccgcatccgctctccgtgaaaatggcgtcgtgctccggtccggagaggacggcgcgtatttttccggcaactgctttatcgtgcagcgttactcgccggtcagcggcatctacatggtgttccttgagacctcgccggtcagcctgaaaaaaatcaaccggctgatcctcgttatcctcgcgctctctctgctcgtctcggcgctcgtgccgctgctgtttttgatgctcaagcgctggtacctgcgcccgatggagcagatggaccgcgacctgctgcgcatccgctccgggcagatggccgtgcgctttcgggaggaccagaaggtcgaggagctgcaaaagctgagcacctccttcaacagcatgatggatcaagtcaaggatctgaaaatcgaggcctacgagacggagctcaaatttcaatacgcccagcttcaatacttacagctccagatcagcccgcactttttcctgaatatcctgaaatcgctgtacggcatggcgcagggccgggattaccggaagattcaggacgccattttgatggtttccgaccacgtgcggtacatcttccacgacaataaggatcgtgtcgccctgcgcaccgagctgcgccacgtggaaaactacatcaatatgcagcggtatgtgacggcccagccgattgattttcaagcgtccgccgagcctgggctcgagggcgcgctgatccccacgctctgcctgcaaacctttgtcgaaaacagctgcaaatacgcgatgctgcccgggcaggcgctcgttctgtcactcgagctccggcggctccgctccgatgcgggcgacagcctcgacatcacgatccgcgacaacggccccgggctgccggccgcactgctcgaagagtacaaccgcgcggtgtccttcgattaccgggaaaatcacatcggcatcctgaatatccggcagcgtctgcacctgctttacggcgaccgcttcgggttcgcctgccggaacctcgcgcccggcacggaatttgagctgatttttcccctgcactttgaagaaagccaaagaaaaacagatgggaggccctgtatatgaaagtgcttgtcgtcgacgaccagcccgacgtcgtccggggcattttggacggcgtgaattggagccggctgaaaattgagtctgcattcggcgcaaacagcgccgccgaggcgcgcgaaatcctaaagcgggagcaaatcgatattctcctgtgcgacatcgaaatgcccggtgaaagcgggctgcacctcgtctcttggctgcgggagcaggggcagtccgtcaaatgtattttcctgacggcccacgccgatttcgcctacgcgcagagcgccctcaagctggaggccgccgattacctgctccagcccgcaagctacgccgccatagagggggccattctccacgccgtcgagcgcctgcagcaggagcggctcgcccagctctacagcacgatggggcgcggcgccgcgcaggaggcgcttggcttcaggcggagcatcctgcgcgaatttctgctcggcatccggggcggcgcgcaggaggcggcggaaaaggccagcgccttcggcttctcctgcatgccggaaacgctctgccgctgcgtgtgggtgcagatccagcattgggagggcgagccgatggaatacggcctcctgctctacggctttcaaaacgtgctcgaggagctgctcgccccgatgagccggcagaccacggtgctctcgctcggcggcgatgcgtacctcatcctgcttgacgcagacgagagcggcggcgcctacgacgcgctttgcagcagcctcgaatcctttcacagctttgcgaagcaggagctgcacctcggcctcacctgcctgctcgggcgcagcgccgtccccttccgggagctgccggcggaatacctgcgcctgcaggaggcgcaccgtaacaacgtcgcgcgtacctgcggcgttctgccgctcgaaagcggcgcggcgccgccggatgtggagcccgatttcgccaagtggcagagcctgctcgacgagggctgcggcaaggccgtgcgcgaggagatccacgcatacttcgaccggctgagccggcagggcgctctaaaccgggaggtgctctccgcctttcacgagagctttctagaactcttcttcggtgtgctccagcagcggcgcgaccgcgtgcgcgaggttttcaacgacacctttgactacgacgcgatgctgcacgcctgctccacgctgccccagcttctcgaattcgtggacttcgcgacggattacgccgaggcgcggcagggctgccggcaggcgcagggccgggcgcagatcgacagaattttgagcttcatccacaagaacctgccccgcagcatcggccgcgccgaaattgcaagggctgtgtacctgaaccccgagtacctctcccgcctgttcaaaaaggaaatgggcatcgggctgaacgactacctcgtgcaggagcgcatgaaaatcgcgcagtctcttttgaaaaacacctcattttcaatcagcatcgtcgcctccaaggtcggctacatcaacttttcgcacttcgcaaaagccttcaaaaaggcgttcggcatgtcgccctccgaataccgaaaggcctgcgagaaagagggaaaatgacgcaaaaggtcactttcggaacagcgtgaagtcacagccgcggcagatttctccgtttttattagctaaaataaatataaatcttcctcatcgtttcaaaaataaaagcaaaaattgctgtaaaccacacagaggaaggcagaaggaggaacagacatgaagaaagttttggcagccatactcgccgccgctctgctcgtttcggccgcatcagcctgcggctcggacaccgcggacccatccggcggcacgccggaaagcgccggcgcctctggcgcggcagacgcgagcgcacaggagccctacaccgtgaagctcttaattcccggcgatgcgaaaaccgaggactgcgcggccgtcgccgaagccgccagcgccattctcgaggagaagtacaacacgacgcttgagatcacgcgcatcggcttcggcagctatcccgatcaggtgaacctgatgttctcctcgggcgagaagctcgacgtgctgtacaacaaccgcgatattttcatttccgccatcaacaacggccagattgtctgcatggaggactacctcgaggaatacgggccggacctgctcgagcagatccccgaatcccgctgggcggccacaacgctgaacggcaagcgctacgccgtacccgccaataaggaggtcgccgtgagctggggcttcgcctgcgtcaaggaaatggcggacgccacgggcgtggactacagcaatatcaaaaccgaggatgatcttctccccctgcttgaggccgtgcaggagatgtaccccgactactacccggtcgtttccagctacggcggcatgagcatgatggttacgaacgacgacctcggcggcgacttcggcgcgctggaggactgcaccgacaccgatacactggacgtcgtgaatttctacgcaaccgatacatacaaggaaatcgtcgagcgccgctacgcttggtctcagaagggcctcatcatgccggacgcctcctcgagcaccgaggacagctccgccatggtcgcagccggcaaggcattcggcatgttcacgaacacgaagcccggcattcagggcgagcttgagaaaaagaccatgaaggaaatgctggtttttgacctgacccccgcctacacgaccaccagccgcatcgacattctctggtacatcgcgcacaacagcgaaaagccggagcgcggcgtgcaggttctcaacgagatctacacgaatccggagctcgcgaatatctgcatcaacggcattgagggcacgcatttcgagatcaaggacgaggaaaagggcatcgtcggcttccccgaaggcgtggacggcaccacgacgggctacccctcctacccgtgggcgtggccgaacgagatgatctcctacgtctgggagggtgaccccgaaaccatctggacggacaccgccgcatggaacgaggccgcgatcgtctcgcctgcaatgggcttcacatgggacaacagcgcggtactcaatcaggtgaccgcctgcaagaacgtcgaagacaagtacaagaacgcgctggagaccggctccatcgaccccgcatcggcgctgcccgagtttttaaaggagctcgaggacgccggcgtcaacgacatcattgcggaaaaggaagcgcagttcagcgcatggcgcgccgagcagggctgacccgcaccgcagcagaatatacggcaaaaggcggagtatggtcatttcccatgaccgctccgcctctcttatcaacccagctagggagggattttctgtgacttcgaaaaaagcggggctcatccggcggctgaaggcttacctgccgctctacctgatgctgatccccggcgccgcttaccttatcatcaacaattatatcccgatgaccggcatcgtcatcgccttcgagcagttcaactacgccaagggcatgtggggcagcccgttcatcggtttcaaaaactttgaatttctctttaagacaaaggacgcgtggatcatcacccgcaacacgctgctctacaacgtcgccttcatcgtgctcggcacgctctgcgccatcgccgtggcgattttactgaatgaaatccattccgcccgcgcgaaaaagctgtaccagaccacgatcctcgtcccgtttttaatctccatcgtcgtggtcagctaccttgtatacgcctttctcagcagcgattccggctttctgaacagctccgttctgccgctgctcggcatagagccgatctcttggtacacctcaccgcagtattggcccgtcattttgatcatcgtgaacatctggaaggggctgggctacaactgcatcatctattacgccacgcttgtcggcatcgaccgcggctactacgaggccgctgtgatcgacggcgcaaaccgctggaagcagatcatccacatcacgctgcccgcactgaagcctacgattatcacgctgacactgatggcgatcggcaagatcttctactccgatttcggcctgttctatcaggtgcccatgaattccggcccgctgatcaacgtgacgaataccatcgacacctacgtataccgcggcctcatgtctctgaacaacatcagcatggcctccgccgcgggcgtctaccagtccctgatcggcttcctgctcgttctgagcgccaacggcatcgtccgaaagctcagcgcggacaacgccctgttctaaagccggaattttatggaaagaaaggaactctacttatggttgataaaggaaaaacctttcaggtggccgcaaacctgattatgatcgtgctcacgctgttctgcctgctgccgtttctgctgctgatcatctcctcaatcacgcaggaaaacgctctggtgcgcaacggctacagctttttccccgagcagatcgatttcgccgcttacaagtacctgctcgtggattcgacgagtatcgtgcgcggctacatcctgtctgcgttcgtcaccgtgacgggcaccgtcgcgaacctcgccgtcaccacgctgttcgcctacccgctctcccggcgcgatctgcccggccgggcgttcatctcgttcttcctattcttcaccatgctcttcaacggcggcctcgtgccgagctacatcatgtggacgcagaccttccacatcaaaaacaccatcgcggcgctgctcttcccgaacctgatgatgggggcgttctacgtcattatgatgcgcacctatttcacgacgaacatccccgaggccgttatcgaggcggcgcgcatcgacggcgccggcgagctgaccatcctcgtccgcgtcgttctgccgatgtccgtgccgatcatcgtcacgctggcgctgctcgtcggcctcgggtactggaacgactggctcaacggcctgtactatatcaacgaggaccggctctacagcattcaggtgctcctgaataagatgctgatggacgtgcagttcctgatgagcaacaccaacgcggcgcagtccctccaaaatcaagacatcgcgctgccctccacaggcatcaagatggccgtggctgtcatgggcgcgctgccggttctcgtcatctatccgttcttccagaagtatttcgtgaagggcatcgtcatcggcgccgtcaagggctgagaaaggaatcgatatggaaagctaccgcttcgcgcactgcgcatccgtttacaccatgcagccggacgacccgcaggccgccgtcctgaatacaagcggccttattcctggcgaggacggactctgcgacgtgacagaccgcctgcagagccttctggacagcgtcaagcaaagccgccgctgcggcatcgtgctgatccccgagggcgactacgcgatcagccgcaccgtctacctgccccgcgccgtgcgcatgatcggcttcgggcaaaaaaggccgcggttcattttgcgggccaacacccccggctttcaggcggcgccggaaaaggacaagggcaaagccgcctaccttttctggttcaccggcaacatgccgcgcatcgacggggagattcaggacgcgaaccccggcaccttttacagcgccgtctcgaacatcgatttctgcattgggccgggaaacccggccgccgtcgcgctgcgcgctcattttgcacagcactgcttcgtctcccactgtgttttcgacatcggcgagggcaaggccggcattttcgatgtgggaaacgagatggaaaacctcgtgttcctcggcggcgattacggcatctacaccacaaagtgctcgcccggctggcccttcgtcttggtcgaaagcgccttctgcgggcagcgccgcgccgccgtccgctccagagaatgcgggctgaccttcagccacgtcgagatctgcgacacgcccgccgccgagctcgccgaggacggctattgggaaaagctgttctggaaggactgcgttttggagaacatcgccgggcccgccctgcagatcgcacaggaggaaaacagctgcacgcagatcaatctgcaaaacgtgtggtgccgcaatgtccccgcactgctgcgcggcagggaaagcgggcgcatcctgcccgggcgcggcggcgcatacattgtgcgcacgctgctgcacggcgacgactgcacgctgggggacgccgaaaccaagcgggtgagcttcgcggaaacggatcccctcgaagatttcacccccaattttccgcgcgagattgtcgatctgcccgcgcagtccctgtggacaaacgcccgtgatttcggcgccgtcggcaacggcaccgccgacgacacggccgcgctgcaggcggcgctcgaccagtgcgcggccgtctacctgccgcagggcgtgtaccgcgtcacggatacgctccgcatgcgcggcggcggcgcgctcttcggcctcagccccatctccacgcagatcgccatcgatgaaaacagcccggcgtgggccggtatgggcgcgccgaagcccgtgctggaaacctgccggggcgggcggcagctcgtcagcggcatcggcattgacaccgcggcgcgcaacccgcgcgctgtcggctgcaaatggatggccggcggcggctcctatatgaacgacgtaaaattcgtcggcggccacggccagatcacgccgcaggccgaaaacgtgccgacctacaacccctcccgcaccgcggaccacgaccccaaccgcccatgggattcgcagtattggagcctgtggatcaccgaaaacggcggcggcgttttcaaggatatttggagcgcaagcccctacgccgaggccggcgtctttatttccgagacgaaaacgcccggcgtgatgtatcagatctccgtcgagcaccacgtgcgccatgaaatcctgatgcgcggcgtcgaaaactggcggttcctctgcatgcagaccgaggaggaggtcgcggagggcccgcactgccagccgtacgagctgagcggctgcaaaaacctgctcttcgcgaacctctatgcgttccgggtcatctgggtggataacccgcacccaagcgtcgtgcgggcatgggactgcgaagccctcgagcttctcaactgccacaatttcacacagatgaaatacacgatcgaaaatctgtacgtcgatgggaacaccggcgagcgcgccggcttttggcagctcgcacgcctgcgggttccggcacagaggcccgcgcagccgctgcccgcaaggcagggcgaatggcgcacgctcacagacagcctcgactgcgcggacgcgctctgcgccgattttgccggaaacgtctacatctgcgattcgcgcctgtgccggatctaccggtggagccccgcggcacagcgcctctcgctgctgaccacacagcatttccgcccgctctcgctcgcctgcgacaccgaaggccggcttctggttgtcacggaataccgcccggttccaaacgccgaaatcggcggcgtacccgagctttccgcggatgaattcggcggcgatgacggcggcggctgttactacccgtttttcagccttgaccggcgcatccgcgtctatgcgatggagcccggcgcaccggaggcctccctgacgctgcttccggtcgtccccatcgccgaggcgcagccggaatcgctctggtatccgctgaaccagtggcgcgacagcggcgacatgacggcctccttccaaaaggcggacacgcactgctatctcgcgcccgacggcaaaacggccgtcgtccacaaaccggcgctcgcgcgcgctaccgggctgacccgccttgagcccggccgccccacctatcttgtcgacgagtacaataagtgtgtcctacaggtgcaggtcggtccggatttcgcgctctccgcgccggaaatctgggcacagcgcggcgaatacggctttgccatgaccgaaagcggcgaggcctacgtgccggacagcctgctgtacgtgtaccgtgaccgcgcgctgctgcggacaatccggcttcccgaccgccccgcatgcctgctcgaggccggggacaaccgcgaatttctctatgtcaccgcccggcgcgcgctgtacgcgctgcggctgaaataacggcgaaggaactcggccgccccgccgcccgcacaaaccgctgcacgtaatccaaaagaagtccccaaacagccgaaagccgcatatcaaaagcctctccgacccgtatgggccggagaggcttttggcacccccaacaggactcgaacctgtatctaaatcttaggaggatcttattctatcccttgaactatgggggcacaatagatgcggctgcgatgtttattttaccgcagatcgcgccgtttgtcaaacggatcgctgaattttttcgggttcccggctttgatgggccacaactgcataccggtcaattttcccctgcaaaaaacagggaattttgtcggagctttgcttgactatttcaatggattatactaaactaattaatgtctgattaatgtatggaattcttaaaacttcagtcgaacagcggcggcatcgcgccgctttaaatgggatattaaggggtcacgtctatggtttttgccgatctgttcttcatctacttttttctgccgctctgcctgattgcgtatgcgctggctaaaaagctcagcgctaaaaacacggtgctgatcgtcttttcgctgatcttctacgcgtggggtgagccgctttggatcctcctgcttcttttcagctccgcattcaactggttcatcggcctgcagattgaaaaataccgggagacacagtgggcaaagctcgccgtagcgggcggcatctcgctggatatcctgcttctgctcatcttcaagtacagcgctttcttcgttcagaacatcaacggtgttttcggcaccggcattccggtaccgcagatcacactgccgatcggcatcagcttttacacctttcaggccatctcctatgtgctcgactgctactgggaaaccgtacacgtacagaagcactatccgaaattccttctttatatctcgctgttcccgcagcttatcgcaggcccgatcgtccgctacagcgtgatcgaggatgaaatcgacaaccgcagcacaacggtgaacgacctgtgcgagggcgcgctgcgcgtgatcgtcggcctcgcgaaaaaggtcatcgtcgccaacaacctctgggtaattgtcgatgccttcttcggcaaggacatcgccgggctctccgtgttcggtacatggtataccgtgattgcctattccctgtacgtctactttgatttcagcggctattccgatattgcgatcggcctcggccgcatgttcggctttcattttgacgaaaacttccgtcatccctttgcctgcaagacgattgcggaattctggcagcgctggcatatttcgctcggctccttcttccgtgattatttgctctatgtgccgatcttcggcaaaaaccgcaagtacgtaagcctttttctcgtctggttctgcaccggcatgtggcacggcgccgcgtggaatttcatcctttggggcctctatttcggcttcttcattttcttcgagcagaagctcggcaaaaagcgcatgaaaaaatggccgatttggtggaagcatatttacagcaagctcgttatcatcatcggcttcggcatcttttacttcgaggatctcggccagctcggccaatttttcctcaatctgaccggcatcagcatgcttacaaacgccgcgccgtttgccgatccgatcacctggtcctccctgcgcaataatattttccttctcgcggcggcggttgccttcagcctgccgatcctgccgaaggtcaagagctactttctcgaaaacaaaagcgatacgatctacgccattgggcgtatcggctccgctgcggtatgccttgcgctgctgattatcgtgagtattctgcttgtggattcgaccaacaatgtattcctctacttccgattctgacagaaaggagatcgccgccatgtcccaaaccacttccgaaaagccgcaggatgcagctgaaagacgcgaggcgcgcgcccagcaccgccgcgcacttttacagacccggctctctctcgtttccgtcggtgcctgtctgctcatctttgcgctgatcgcgatcttcctgctcgtttttccgcgctccaccacgtcgcagattgagaatcgaagcctcgcaaaatttcctgccttttcgctgcaaagctatttttccggagaattcacctccggcatcaccactttttacgacgacacggtgccctatcacgacagcttcaagaacatgagcaaccaaatgaaatcgacctttggtatgcgcttgttttcgagcttctccgcgcccgcggcgtcggatgacgacgaagcggaggccacgccgacgccctccccgacgccggacccctttgagggtgtggcaggccgtgagatcctttcggagttcgtgcaggccggcagcgcctcgacggagccctaccagcgcgattattccgccgagagcaacggcacgctcgaatgggtaaacaacctcctgatggtcaactgggacaaccattggcgctgcatggagccgttcggcggtggcggcggcacaaattatgccgctgcgctcaatgacctgcaaagtaaaatcagcccgaatgtgacgatctggtccatgcccgcgccgactgcaagctccatctacacgccgaagaatgcactggaatacgttgccgatcaggccgaatgcttcgacggcatcgccgccaagctgaacagcggcatccagtctgtcaacgtggtcgatgtaatgaagaaacacacggaggagaatatctacctgcgcaccgaccaccactggcagccgctcggcgcctattacgcggcgcgcaccttcgcggaggccgccggcgtgccctttgccgatctctccacctacgagaagggcgtgaacacgggctatgtcggcacgctgtacggcttctcgcaggactcccgcttgaaaaatgaccccgaggatttcgaatactacgtgccgcgcgccaagtatcaggcctatttctatgacgccgctttcaactaccagtacagcggcgatctcttcgccgaggtggataccgccaactcctacgtgatgttcctcggcggcgacgactatgtcgtcaaggtggataccgaggtgaagaacggccgcaagctgctcgtcatcaaggatagcttcggcaacgcggagattccgttctacacaagctccttcgagcagatctacgtgctggacgtccgctatttcgagcgcaatctcgtcaacttcattgaaaccaccggcgttaccgacgtgctcttcacgatgtccgcctactccgtcgtcggcgacaatgcggacaatatcgcaaacctgatcagtcaggacgccgacagcaccatcatagatgagcacccgaccggctccgccgctgcggcggcaacggcttcgcctacgcccagcgcatcgcctaaggcctgaccggtgcgcagaaaggaaacccatgatgaacgaacttgaatacccttttgacgctgcctatatcattcagaagcgccgcgccatccgcaagacactgctcgcagacggcacggtgcgcatgcaaaagcgcattgccgtgctcggcggctctacaacgagcgacatcgtgaaaacacttgagctgtttctcctgaacgccggtatcgagccgaccttctacgaatcggaatacgcgcagtattttcaggacgccatgttccccgatgaaacgctgctgcgctttcagccggatatcgttttcatccataccacgaaccgcaatgtcacgaactggccggaaacctcggacaccgccgaagctgtggcggaaaagctgcgtgccgagaccgagaaattcaccgcgatgtggcgcagcgttcaggaaaaattccactgcccgatcatccagaacaatttcgaaatgccgttttaccggcttctcggcaaccgcgacgcatgggatttccgcggccgcacaaacttcctcacccgcctgaacgaagctttctatgctttcgcacgcgaaaacgagagtttctacatcaacgacctcaactatatttccgcggattacggcctgaaggcgtggtcgaacccgctgttctggaacatgtacaaatatgcgatgtgctttgaggcaatcccggcctttgcattcagcgtctcgaacatcatcaaatcgatcttcggcaagaacaagaaggcgctcgcgctcgatctcgacaacacgctctggggcggcgttgtcggcgacgacggcgtggacggcatcgagatcggtcaggaaaccggcgtttcgcagtcgtactatgaatttcagagctatgtaaagcagctcaagtcgatcggcatcgtgctgacggtctgctccaaaaacgaccgtgagaacgcgatcgccggcctcaatcacccggagggcgcgctgcggcccgaggacttcgtcgtcatcaaggcaaactgggagaataaggaccgcaacattgccgagacggccgccgagctcaacatcctccccgactctattgtctttgccgacgataaccccgccgagcgcgagatcgtgcgcacgcagatcaagggtgcggccgtgccggagatggagggcgttgaaaactacatcacgacgatcgatcgcggcggttactttgaggtcacctcgttcagcgaggacgatctcaagcgcaacgagatgtacaagaaaaacgcgctgcgcaaggccgaaatggcctctttcgtcgattacggcgactacctgcgcagccttgacatgcacgccgtgatcgacgacttcctgccggtctacatcgcgcgcatcacccagctcacgaacaaaagcaatcagttcaacgtgacgacaaagcgctatacatccgccgagatggaggccgtctttgaaagcgccgatcacatccgcttgtacggcaagctcgtcgataaattcggcgacaacggcgtcgtttcggtcgtgatcggcaaaaagaacggcaaaacgctcgacatcgagctgtggctgatgagctgccgcgttttaaagcgcgacatggagctcgccatgctcgaccggctcgtggagcgctgccgcgaggccggtattgaaacgatccgcggctattattacccgaccgccaaaaacagcatggtgcgcggcctgttccagagcttcggctttgaaaaaatcagcgaggatgaaacaggcaataccgtctggcagctcgccgtttccggctacgcgccgaaaaaccatgtgatcgaggtctcaggcaacggggacagcgattgaataccagcgaaaatcaaacttggaaaggatctgctaagtatggacacgagagacatttataagagactggaccgcgtatttcaggacgtctttgatgacgacagcatccatgtttcgccgaacacgacggccgacgacatcgaggactgggacagcctcgaacacatcacactgatttccgccgtagagcgcgaattccgcatgaagtttaaaatgggtgaaatctcctcgatgaagaacgtcggcgagatggtctccatcattcagtcccgcgcaaaactctgatccagcaaaaaaccgcggcccggcatgattgccggactgcggttttttatactcttttatttataccggttcataaagtcgttgtaatcgtcgtctacgcggctcgaggagcggggacgcgcggacggcgtgccgcggcttctgcgctgcgacgcgctgccggagggccggggcgagccgccgcgctggccgcgtctgcggcgcgcctccatgcgctttctgcgcacgctgcgcccgtggaagtacgccacgacaaccagcagaacaccgagcccgagcaccacgagcagcacgatgccggcgcccttgaggatggaaaggaacacattgccgcccttctcgccctccgccttgctttccgtgccgcttgcatccgcttcggggcttgcggaggcgccggccgcgagctgctgcgcgcgcacgaagccctccgccttttccgacgccgccgtgacaaagttcgtcaccgctgcgtcgtacgccttattcgtgaaatccgtctcgagattttcgctcatcaggcttttcagcacgctcagcgtgaagccggattgaaaattatccgtcggcgccacccagtaatcctcgtcggagatcgagagcacgagaagcaggccgttccccccctcgccgccgaggttccagtcctctacgacctgcgccgcataggccttgcgcccctcggcgtcgccgcccggcatcagatccatcgtcatcacggcgatctgcgcgccgcagctttcgtccagtgccttgcacttttcgacgatcgcgctctccgtctcatcgctgagcacattcgccccgtcgtacacatagaggttctcggggcgcgccggtacggccgccggcgaaggctccgggctcgccgtagctgtctggctctcgccgttccccgcgtcgccgcccgcttcgtccgccagagcctgcacgccgccaagggtaaatataagcatcagggccagcagaagcgacagagcgcgccgcccgccgaaagcccctcttttttccgaaacaacccggtgctgcatagtatcaccaatccttattccgagtttagattaaatctattctacgtttattccgcccccgtgtcaaggaaaacctgcgctttagggccgaatgcgccggtaaaacagcgcgtaaaggagctttcccatgtagctttgcagcatcgcgcggtaatcctcgaacggcaccgcgccgccgcggcacagaatttcataggcgacgccctgctcgcgcatcgtgaagccggcctcttgaaagccgcagcgcaggtaaaacgccttgcgccgcctgcgctgctcgatattcgggctcgcttcctcaagcgcctcgatgctgagcaccatgcgctttccgctgtagcggtgcccgagcgcctccagaacggcggtgccgtacccggcgccccgccggtcatcggagaccgcaaagtaaaagagaaacacgaggtccttgtggctgaccgtgtatgccagcccgacaaagcggtccccgtcgagcgctgcgaggcattccgccgcgccctttttcgccttgcggagaaggtagaaaaacgggacgcgctcctcagacggaaaggccgtgccgtacagcgcgcgaagctgccgcatccacccggcgtttccgagcgcgctttccagccgcagcgcggcatgctgtgcaccgctcatttgagctccaccaccgtcacgccgctttcgccctcgccgtacacgccgaggcggaaggttttgaccgccttatgccgcttcaaatgctgctggatgccgctgcgcagcacaccggtgcccttgccgtggatgatggtcagcatgttgagattgcgcaggagcgcgtgatcgatgaacgcgtccacctccatcagcgcctcctcgaggttcatgccccgcacgtcgagttcgttgcgcactgaagaatcgtccggcgcggccttcgtcacattgcggtggccgccgagcctcttttccttcggctttttatcggtgagccgcaggttcttcatcggcacgcgcgtcttgatgatgccggcctgcacgagcacctgatcgccggttttcggcagctcgagcacgaccgcggccttatcgatgtcgtagatcagcacgttgtctccgactttcagcgggcgcggcagcacataatcctcgtttgtgtgcttttcatgcaccgggtcgctggccttttcgaggttgcggatgccggccttgaggcgcgctttctgctccgccgtcagcatcgcatttttctcgcggcgcagcgcgtcgagctcgtcgagcaggccctgcgcctgctggcgcgttttctgcacgagtgccgccgcctctcgctgggcgcgctcgatctcgtgtttcgcgtccttttcggcgcggtcgcgcgcggcctgcgcctcgcggacgatgcgctccgcgtcgatgcggtggcgctcagcgtcgcgccgctcgtcctccattttacgccggctgtcctccagccgcgtgacgacctcctcaaacaccgtgctttcctcggaaacaagtgttttcgcgtgctcgacgatctcctccggcatgccgaggcgcttcgagatcgcaaacgcgttcgacttgcccggtacgccgatcaaaagccggtacgtcgggcgcagcgtcgccacatcgaattcgcagcagccgttttcgacgccgtcggtgcgcagcgcatacgctttcagctcggcataatgcgtcgtcgccatcaccttcgcgcccttttcgcgcatcgcctcgatgatcgagatcgcgagcgccgcgccctctaccgggtcggtgcccgcgccgagctcgtcgatgaggatcaggctgctgccgtcggccttgtcgagaatgcggatgatattcgtcatgtgcgccgagaatgtggagagcgactgctcgatgctctgctcgtcgccgatgtcggcgagcacgtggcggaacaccgcaacctcgctgccctccccggcggggatcatcaggccgcacatcgccatcagcgtcagaaggcccgcggtcttgagcgatacggtcttgccgcccgtgttcgggccggtgacgatcagcgcgtcgaacgcctgcccgagcagcaggtcggtcggcacgaccttatttttgtcgatcagcgggtggcgcgccgccttgatgcagacgcggcccgcgtcgttcagcttcggcacgacggccttcatcttgtaggcaagctggcccttcgcgaagatcaggttcagttcgacggccgcgcggtagctctgcacgatgccgtcggcgaattcgccgacctcgcgcgagagctccgccagaatgcggtcgatctcctcctgctcgtcggcgcgcaggacgcggatctcgttgttcgcctccacgacgccgatcggctcgataaaaacggtcgcgccgctgcccgaggaatcgtgcacgaggcccttgacctcgttgcggaattccgcctttacgggcacgacgtaccggccgccgcgctgggtgacgatggcctcctgcaaatatttctggtaagtctgcgagcggatcatcttgtcgagctgctcgcgcacgcgcagcgaggccgcgcggatcttccggcggatcgcggcgagcgcgacgctcgcggtgtcggcgacttcctcctcgctcgcaacggtcatcgagatgcgctcctcgatgaatttgttcggctgcagcgtctcaaagcggtagtcgagcgcggtcttaacgctctcgctctttttccgccagtccgaaacgctgcggatcgcgcggagcgtgcccgccacagcgagcagctcgggcaggttcagcacgccgccggcctgcgcgcggcgcagcgcgttcgtcacgttcgtcatcccgtagaacgacggcgcgccaaatttcgccatcagcacgaaggcgtcgtccgtctcctgcaaaaggcgcgccacgtgctttaggtccgtatccggctcgatctccgccgcgagcgccgccgcatccgcgcaggtcgtttcgttcgcaagctgctggaggatcttgtccagctccagcgatttataatctttcagcatagtttgctccccatagaaagcgcgcggcctgcaccccgcccgcaagcggcggcgggacgcgcgcgttttcaatccaaaaaggtcttataaaattcaagtgttttcggcatggtgtgcagcgtgcgcaccacgcagctttcggttgcggcattcaggatcctgagcgcgggctccggcaaagaaaacgcatacagcttttcaaaatccgagaacacgatatgccgcatcgcggtcaacacgccgggcggcagcgcgatgtacggctcgcccgtatccgcaaagcagtccttacagcgcagaatgccgctgtccggcagaaaatacatcacgtccgattcgtacgccgcgcagtcggcgcaggcgacgagatccggcatatagccggcgatcgcgagcatgcgcagctccgtcaaagactgcaagagccgctgcgggcgcgttccctttgcgagaaagtgcagcgaattcagcacgagccgcaggtattcctcggaatccgtctcctcgggcaccatcaggtacgcgagctcgcagaaatactgcgcgagcgaaagcgcgccgatgtcccggcgaagcccgaaaaagacctcggccggttcggcatcatcgattatgtatttgtcccgccccttgaaaatcgaaaggcgggaatagcagagcagctgtgtcgccgcgctcttgctgtccttcaaattcttcgcgcggcgcgcaaaggcgcgcagcacgccgctgtctcgggtcagcaccgtgacgagccggtcgctttcgccgatcgtctgctccttaataattaacccctgtgttttgatctgcattctgggctcctgccgtatgggcgccggaatccctccggtgccgaagctgtgcgtaacggatgtaatcttccacgctgccgctgtggtaaaagctgctccacgcccggctttccgcctcgggcatttccggaaaatctctcctctcggaatccatcatgtcgaacaccatgcctttccttagagcctgcgccaaggccgcacgccggcggccggccgctccgttttaacgcttctactcttagagtatttgcgctttccaaaaggctatgacaggaaaataaatcttttaccgacagattccggcagaaattccgcagcgaatgtgctaggggatcagttcagaaggtcgcgcttgtcgaagccgagcgccgtcagcacgccggggcgctgccgccagtcctccttgaccttcacccaaaggcgcaggttgatcctgcacccgaaaaagcgctccatatcctcgcgcgccttcgagccgattttcttgagcatcgcgccgcccttgccgatcagaatgcccttgtgcgtatcgcgctcgcagtagatcgtcgcgtcgatatcggtgatgtcgccgcgttccttcatgctttcggtgacgaccgcaacgccgtgcgggatctccttgtccgtaaagcgcaggatcttctcccgcacgatctcggcagcgatgacgcgctcgggctggtcggtgagcgtatcctccgcgaagaagtgcccgcccggctgcgcgaggcgagagagctcgtccttcagcgcgtccatgccgtttccgtcctttgccgaaaccggcacgacggcgtcgaaatcgtagagctttgagagcgcttcgatctgctgcatcagaagacttttgtcctccaaaaggtcgatcttgttgatcgcgagcacggcgggcagcccgatcgatttgaaccgcgcggcaagctcctcgtcggcctttgagatcttcgtgccggcttccgtgacgagcaggcaggcatccacgcccgcgacagactgcgtaacgctcttgaccatgtaatcgccgagggaattattcggcttgatgaggcccggcgtgtcgatgaacacgagctgcgtttcgccctcggtccacacgcccatgatgcgcgtgcgcgtcgtctgcggcttactcgagacgatcgcgagctttgtgccgatcaggcggttcaaaattgaggatttccccacattcggccgccccacaatggcgataaacgccgatttctcattcatataatttggtgtttccatatatggcttcctttaccgtttcacgccgcgcggctttttgaaagcacggcgctatctccttttttttcgctcaaagagccctgcgatgcccgtggggccaagaacgatgaacacgagcgccagcgcggtcacagcgagaaaaagcgggcaatagagcggcgaggtgaagatctgcaccgcaagcgcccacagcgccttcggccgccataataccgcaataccgacaaaagcggcaaaaacggcgctgatgagcaccgcccccgccgcaatatccttcgttctgccgatgaaccggttatagcttttctgcgcgtaatcgcagagcatctcgatcgccgtgttgaagccctccgccgtgatgaccaccgccaccgcgagcagaagcgccgcaaactccccgcgtgaaacgccgaggagaggcgaaaaaaacaaaacgtataccgccgctgtcacgtgtatacgcatgttccgctccgttttgaccgcgaaaagaatgccgcgcgccgcgtcgccgaagctatctgcgagcgtgcggcgttttccctttgtcttccagtccggtaccatgtcacacggtatagctggacgtgcccggcaggccgagctgcgtcatgacgtattcttccttttcgcgcatgcgcacgcgctcgatgccgccgctctcgtggtcgtagcccagcaggtgcagcatggagtgcgccgtcaggtagccgatctcgcgctcgaggctgtggccgtagcgcttcgcctgctccatcgccatctccatcgagagcacaatgtcgccgagaatcttcgcgcccgtgtcgtggttaatgtcgtacacgccgttttcgcccatcgggaacgagagcacgtccgtcgcgctgtccttgttcctgtactgggcgttcagctcgcggatctgctcgttatcgacgaaggtcacgctgatttcagcggaatcctcaaatttctccatccgaagaaccgcatggcagcagcggcggatcagcatgcgcacgccggtgggaaccttaaccgccttctgatcgtttttgatgatgactctgattttttccatatgccaaaatcctttcggttcgggaatccccgccggcgccgcttgatgccgcgggcccgggactccacaggggttattttgaagcggacgccctttcgtacgcccgtatgatgtcctgcacaagccggtggcgcacaacgtctttttccgtaaagcggaaaatcgaaatgtcttcgacgttccgcagcacgcgcatcgcgtcgcgcaggccggagcgcttgccgtccggcaggtcgatctgcgtgacgtcaccggtgatgaccattttcgaattgaagccgaggcgcgtcagaaacatcttcatctgctcgcaggtggtgttctgcgcctcatcgaggatgacgaagctatcgtcgagcgtgcggccgcgcatgtacgcgagcggcgccacctcgatgttcccgcgctccacatacttctggtacgtttccgcgccgagcatgtcgaaaagcgcgtcgtaaagcgggcgcaggtagggatccaccttctgctgcaaatcgccgggcagaaagccgagcttttcgccggcctcaaccgcggggcgcgtgaggatgatgcggctgacctgctgcgcgcggaacgccgtgaccgccatcgcgacggcgagatacgtcttgcctgttccggcagggcccacgccgatcgtgaccgtattcttccggatgttgtcgcagtacgccttctggccgaccgttttcggctttacgggcttgcccttcgccgtgatgcacacgcagtcctcggcgagcggggccatctgcgcctcgcggtcctcctgcaccatgtccatgcagtagccgacgttctgctcgttgagcgtttcacccttcgcgatcaatcccaaaaggctctcggctgtgcgcgccgctttcgatacgccggactcctcgcccgtaatcctgagctgggaatcgcggcaggaaagcgtgacgccaaaggctttttcaatccgctttgcgtgcacgtcaaagctgccgaacagctcggcggccgcagaagcattttccaaaagaatacttttctccaaatcgttctccttcagaggccgcgcgccggcgcgcctctcgatgaaatcctgtgcggagccgaccgcccgggcagaaccgccgggccgctccgcaaagccgcctgatgccggaaaacgcgccggcgccggacgcttggcaccggacgcacacgtccgtgcctacgcagttattatatcataatatatcgatttttggtcacgaaattttaaatgaaattatttagattcgctgtgcagattcgacaaatgccatgaaatgcgtgcggccgcgcgctacgtgccggatgaaatcggcaccgcttcggcaatgttttcctcgcagacgcattcggaaaacgcgtataccacgccgtccttgagggaatacgtgaccgtttcggagagcagcacgccctcctcgccgaggtagatttcctgcatctggcggattttttcatacgcgcgctgctgcgcctgctcctcggtgagctctaccgtgaccggctcatacgcggcggtgcgcagcgtttccacccacacgggcagcgccgtgccgagcagcgtgagcggctcgcggctgtaagcggtgatctccgaatcgggcgcgccggaaagcccgagcggcacgcgcacgccgagcacgtacagcgcgcgccgcgtgccggtgtccgtctcccgctttgattccagcgtcagggggcagctcgccgtgaacgtgtgccgcgtctccgccatgaccttggcacgcgcgtgcgagagcaggtgccgcaccggctcctcgctgtaggggtcgccgatctccgtgatgccggagacgagcacctcgccctcggccacggcggagccgacctcggcgagcaccgtgccgctttcggccgtgaccgaccgcacaaggccggcgcgcttcgccacaatatcgtatgcgccgctgtggtcggcgcccggagcccgctcgacggcgccgcgcacgctcagcgtgatgaaacagccgtctgtgttcatcgaggcccaggagatcttcggcagcgcgagctggaggcggctcgaggccagcgcctcgtcgagcgccgcgcgtgatgcgccgacgtacgccccgcagtcctcggccgcttcaagaatctcgctctcggcatacggcgcctcgccctcgaccgtgacgccccaataaaagccggaaagccagccgtacagcgcgatgccgagcacggcgccgagcagcaagcccggccgccgcagcgcgcggcgcagcacgaacggccagccgcgccggccgataagccgcacacgcgcgtgcgtgcgcactttgaccgcgtgcagccgccggtactgctttgcccgcacggtcaaaagcaggctttcgccctgccggtctatcttgagcggcacgatcccgcttttcactgccacgttcataaagcgcgccgtatcgcccgaaacgcgcgcagtcgcggtgccgaacgcccaccgcgcgattttctcggtcaccggtaagccacctcctcgattttgccggtcagcacggcgctgtcctcctccacgcgcacgagctgcaaattcttcccctttacccaaacctgctgccggccgcaccggaagccgatttcctccgcgccgtattcgacgatgccgtcgcagccctcgagaatcagccggcggctgccgagaatctcggttcggatcgtaccgccggtcaggccaaagcgcaccttatccgttttttctcccatcgccgcgcctcctttctccgctataaatatgcggcggcccccgcgcatatactgagaggaaaccggcaaacagaggaggaaaccgatttgaaagcccacgccctgcccgcacccgtgcgcgccgccgcaaggccgcttgctgcagcactttccgctgccgcgctgctttttctgtgcatcctcgcgcttatgtaccgcaccgacgccgcgaccggcgtgcgcagcggcatctacacctgcctgaacacgctcgtgcccgcgctgtttcctttcgtgctgctcgcctgcctgctctcgggcagcagggcggcaggcctgcttttccgcccgctcgcgcccgtgctgcgccatgtgttccgcctgccgccctgcgcggcgccggcgatcgttttcgggctgaccgcaggctacccgaccggcgcgaagatcgcggcctcgctctacgacggcggccgcctcacgcgcggggaatgcgcccgcctgctctgcttctgcaccgcgccgggctacgccttcgcggcctcctataccgggacgatcctgttcggcagcgcgcacaccgggctgctcttcttcctcgcctgcctgctcgccccccttatcacgggcgtctgcctcgcgcgctttgcgccgaagccggtaaaaaccgacgatgccgtgccgcagggggcgggcagcgtgaccgacgccgtacgcagcggcgtctccgcgatggtctccatgtgcggcttcgtcgtcgttttttcggcgctgctcgctgttctgcacggctccggcctattccaaacgctcacgggcctgctcgcgcgctgcggcctcaccgtacccgatgcgggtgccgccgtctccttttttctcgaggtcacggccggcgcgacgcacagcgcctactggcacaccgcgccggcgctcgtcgcattcggactcggcttcggcggcgtctgcatccacatgcagatcttctccttcttccgcggcggctttccgatgcgccgcaccgcctacctgctctcccgcctgctgaacggcctgctcgccgccgcctgctaccgcgcgctcgcgttcttcttcccggccgccgaaagcgcggcggctgcgggcgagccgctcgcccgcgcctcggcggcgggcagcacggcggcctcggcggcgctgctcgcgctttccgttttcttcctcactgcctgcgtgaaaaaaggcagccttgagccgttcaaagcaggccgcgcgcttccccgtctgccccggcacggcgcgcccattcgttttacaaattcatggtggaaatccgtcccgcaaaatggtacaatggatgtatctttgaaacggaggccaccatcttgttcggacgaaaaaagaaaagaaaagacagcgcgctgttcggccgcagcattgagccggactgcgcatactgcgcgcacagcgtacaggcgcagggcgacctgaaatgccgcctcgggcagaccccggggcaggcccgctgcaagcgctacgcctacgaccccctgcgccgcgagccgaagggcgagccgaagctcgcgcagttcagcgccgaggacttcaagctatgaaaaacctccgcgccttccgcctgcgccgcttctggctgctgcttctgctgccggcggcgtttgcgctcgacctcgccgccaaggcctcgccggattttgccgaatggtacgccgtgaccgtctacccggtctacgcgcggttcttctccgccgtcaccggcgttctgcccttttcactcggggaattctgcctgattgcgctcgtgctctttttgctcatctacctcgcgcgcggcatttaccggcttatccgcagaaaggaggaccgctttgcgcgcctcgtgcgcttcttgtcggttccgctgctgatcgccgtgtgcatcgcgttcctctgcgtgacgaactacggcacgaaccaccgccgctattcgttcgccgccgtaagcggccttacggtgcgggaatcctccgccgaggagctctacgacctctgcgttacgctgaccgaaaccgcgaacgccctgcgcgaggacgtacaggaggacgaaaacggcgtgttcacgctctccggcagtctacaagacgacgcacggcgcgcgaaaaccatcttcaacgcactgcatgcggattaccccacactctacacggccggcacgccgaaagccgtcgttttctcggaaattatgtcctacctcgacatcagcggcatctactgcccgttcacctttgaggcgaacgtcaacgtgcatatggacgacgtgggcatccccttcacgatgtgccacgagctctcgcacctctcgggctacatgcgcgaggacgaggcgaatttcatcgcctttctcgcctgcatccgcagcgacgacgcggatttccgctacagcggcgcgtttctcgcgatggtgaacgcctcgaacgcgctgtacagcgccgattacgcgctttgggagcaggccgccgccctgcgcagcgatgctgtaaaccgcgacatcgcctccaacaacgcctactgggcgcggtacgacacgcccgtcgcggaggtttcgaatcaggtgaacgacgcctacctgaaggccaacgggcaggaaaacggcgtgcgctcctacggccggatggtcgacctgctcctcgcctactaccgcgagggcgaggcataacgcggggcgcgccgtgcagccgcgttttactggaaagcccggcacaggcggcgcccgcagggcatgccaatccgcaaaaaacaacaccgcccgccgaaatacggcgggcggctctgcttttcagccggattattgatttttgctctcccgaacctcgcgcagaatatcgtcgaggtcgaacttgtgcggcgacgcaggctttgccgcgggtctcgccgccggagcggaagccgtctgcgggcgggccgcgggcttcgcctgtgccgcgggtctcgccgccggaacggaagccgtctgcgggcgggccgcgggcttcgcctgtgccgcgggtctcgccgccggggccggagccgcctgcggacgagtcgcgggcttcgcctgcgccgcgggtctcgccgccggaacggaagccgtctgcgggcgggccgcggacttcgcctgcgccgcgggtctcgccgtcagggcggaagccggacgggacacggcctgctccggctgcaatgccgccggcgtgcgcggcacgatcggctgctccacggtgtatgcgagcgcgcggtcgggcacgatcgggatctcacccgtcacggcggcggggtcgtacctgcgcgcgggctggcgcggcgcacggtcgtgctcacgcgcctcgatgcgctcctcatattcgcgcgcctcctgttccgccgcacggcggcggcggttgcgctgctccgcctgctcgatctcgtcgaaaatatcctcgcggtcctccgcgacgcggtcatggcgcttcgagacgcactgccagacgatcaggcagataatgccgaccacgccggcgcccacgagcacggcgcccgccgtgaacagcgtagatccgatgccgtttccagcctcgggctggttaaaaaagctatccgccgcggacgcatcctccggcgcggattccgccgaagccgtgctgctctcgccgcccgcctcatcggccagcaccggcacgctgcacagcaaaacgcagagcagcagcgcggcgagcagcgacgcccatcgtttcatcgtaacacatttcataatcgcaatcattccctctccgccgcggctgcccgcagcgccattccatctttatgtaaggacattttagcatattcggagagcggattcaacgacaaatttcacaaatcttcggcagaaagcacccaaacggcgggcaagtcacggggaagcctcaccgcatatgcgggcggccgatgcgtatggagagcagccacgagagcccgaacagcacggcggataccggcagcgcccgcacagcaaacacgccgtccgcaacaagctgcggcatattctgcaccgtcatcgaaacaaatatcatgcagccgatcacaaggcccagcacgataccgtataaaatgcgcgccttttcgacgccgaaccggaacacaagcggcagaagcacggcgggcgtgaccagccccgcagaaagcagcatgcccagaatgccgcccatgctgccggcattgcccgcgcccgtgccggcccgcacgagctggacgacaaccgccagcacggccgccatcgcgagcaaaagcagcgtgacgatgtatttgaccgaaacaagctgcgccttcgaatacggcatggcacggctgagcgtcgtccagccgctgcgctcgtcgtaggcgatgagcgtgaccgcggtgagccccgccagcatgacggggtacatcaaaaacagcatcggcttttcgctgaacgccgacgcgcccatcatcaccgcgaggatgagcatccacgccttgcagtatttcaccatcatataccagtccttgagaagcagacccttcattgcagccaccctttctcactgtgcggcgcgggcgcctgccctgcgcgcgtccttcaccatgaaaacgaatacatcttcgagcccggccggcgtgatttccatgcccgccggaatcttccgccgctcggcgagcgcctctgcgccgtagcccgcgtgccgcaggccaaggactgccgccgggtcgagcgcagagatctgcgcctcggtgccgtgcacgatgccgcagcgctcgagcaaccggtccttctcctcgcacaaaaggagccgcccctcgtgcagaaacgccgcgtagtcacagatcttctcgagatcgctgacgatgtgcgacgagatcagcaccgaacgcgattcatcccgcgtaaattcgctgaacagctcgacgatctcctcgcgcacaatcgggtcgaggccgtttgtcggctcgtcgagcagcagcagctttgcgtcgtgcgcgagcgcggcggcaattgaaaccttcatcttgttgccgcgcgagagctcggcaaacggctttttctgcggcacgcccagccttctaagcagcgccgtgtacgtctcctgcgaccagcgcccataagcgctttcgagcacccggccgaaccgctccgccgaaagacacgcgggtacgcccggctcgtcgaacacgacgccgatctcctccttcacctgcttaaactgcgtgcggttgtcgtgccccagcaccgaaacagagccggcgtcgcgcgccgtcatgtcgaggatcaggcggatcagcgtgctcttgcccgcgccgttctcaccgatcagccccagaatgcagccgcccggcagcgtcaggtcgatggggccgagccggaagccggggtacgatttcacaaggccgcggatttctactgcgtttgtcatctcaaaatcatcctttccaaatcaaagccgcccgctcggcggttcacgcctcttcgtacagcgtgtgcagcagcgcggcaacctccttctccccaagcccgcacgacgccgccagcgcgatcgcttcctgcaaatgggcctccatccgctttaagtgctcttcgcgcagcagctccgtgtttttcggggcgacgaagcagcccttggccgccacggtgtaaataaatccctctttttcaagctcctcgtacgcgcgcttcgtcgtgatgacgctgatcctaagatccttcgcgaggttccggatcgacggcagcatctcgtccgggccgagctgcccgctgatgatctggttcttgatctgcgtgtagatctggtcgtagatcggcgcgccgcccttgttgtcgatccatatatacattaaaaataccaccatgcctttctcccgcagagccggtaagccgccgcgtcccctacccgcgtcaaacgcaggccggccgcgcggtacagctcccgcccttcgcacatactgtgtattaacagtatatacagtatacacatgtttgtcaacgggtgagccaaaaaaattttcaacagcccggtgcccgcgcggtgaaaaaagccgcttttatttccggacttccgccccgcaaacgcagaaaagccgcccacagcgggcggcttttcctctataacgcggttttccgcgctttgcagtttattttagaacgcggttctctccgcgagatacgcctcgagcgcgtcgatcggcacgcgctcctgcgccatcgtatcgcggtcgcggatcgtcacacagccgtcctccgcactgtcgaaatcgtacgtgatacagaacggcgtgccgatctcatcctcacggcggtagcgcttgccgatggaaccggtctcgtcaaaatcgaccataaagcgcttcgaaaggcggtcgtaaacctcgagcgccgcgccggagagcttcttcgaaagcggcagcaccgcggccttgtacggcgcgacggcagggttcaggcgcaggacgacgcgcacgtcgttcttctccgcgtcgagcacctcctcgtcgtacgcctcggcgagcagcgcgagcaccgtgcggtcaaggccataggtggattcgatgatgaacgggatgaacttctcgttcgtctcggggtcgaggtactccatcttctggccgctgtattcctgatgcttcgtaaggtcgaaattcgtgcggttgtgcgtgccgttgatctcgccccagccgaacgggaacaggaactcgatgtcgcacgcggccttcgcgtaatgcgcgagcttctcgtggtcgtggaagcgcagatgttcgggggcaagacccagatcctcaaaatactgcctgccgtacgccttgaagtagtcgtacagctcggcgtccgagccctccttgcagaaggtctggaactccatctgctcgaactcgatcgtgcggaacgtgaagttgcccggcgtgatctcgttgcggaacgccttgccgatctgcccgatgctgaacggcagcttcgcgcgcatggtgcgctgtacgttgaggaagttgacatactcgccctgcgcgttttcggggcgcaggtaaatgacgctcttgctgttgttcgttacaccgcggaacgtctggaacatcaggttgaattcgcggatgtccgtgaaattgtgcttgccgcagttcgggcaggggatgtgatgatccttgatgtactggaacatctcctccttcgtcatgccgtcggcatgcgcctcagggtcaaaatcgtcgatcaggttgtcggcgcggtggcgcatcttgcactccttgcagtcgagcagcgggtcggagaacgaggccacatgaccgctcgcctcccaaacgcgcgggtgcatcaaaatgtcggcgtccacctcgtagctgtttctgcgctcctggatgaagcgctttctccacgtttccttgacgttgtttttcagccttgcgccgagcgggccgtaatcccacgtattggcgaggccgccgtaaatttcgctgcccggaaaaataaagcccctgcccttgcagagcgcgacaattttttccatcgacttttcttccggcttcaaaaccttgttcatttcgaataactcctttcgcgccgctggctgcggcgcttatgattgtttcatcatagcacgttttgcagacgtgcgcaagggattccgcctgaatctactccatgctttatgaaaaaaagagcttccggcacacgccgaaagcccctttttcgcggatgctcagaccgtctcgctcgccagaatgcggcggatctgcggcagacggaacagaatcgtcgccgcgatcatcgtcgtgatcatctccggcagcatgtacgccccgttgtagcacagggagtaaaaccacgggcggccgacccaagacgcgccgaacgcgacaaactgctcgaggttcgcgaaaatcacagcgcccgaaatcaggtggcagacaaagcgcaggaacacggcgagacccgtgccgacgcagatgccgatatagcccttattgcggaaaatgcccgcaaagccgatgacggtgaaggcgaggatataatcaagcagaagcgtgccgatcagcatcgccggcgtaaggccccagcccagaatgccgtccatcgtgacgccgaacgcaagctgaacgacagactcgacgaacgcggcggcaaaaccccatttcaggccgaacataatggagaccatcgcgcacggcagcatggaaagcagcgtgaccgaaccgccgaacggcatctgcacaaccttcacgaggctgagcaccgcgcccagcgcgaccatgatggcgcacacggcgagcttgtaggtattgctggttttcttcatttcatattcccccagaatatagttttccgaaaaggggatttttgcgccggcaaaaaacgcgcacccagattcggtgcgcgcaaaaataccacggtcgtatttccctacgtcggcattatccgaatcaggttacaggttcaggcggctacgccaatctcagccgactcgatcgtcagctcccttttgtgcttttatcataataccgcccggccgttctgtcaagcagaaatttcgcgaaacagcgcgcaaaagggcaaaaggcgcgccggacggcactttttcaaaatccgccggtgctctcccccgcgggcgcttttcggcggtgcgcaggagaaatatggctatcgccctgcgccgcagggatttcccgagcgccgcgccctctctgccgcggcagccgtcttgctttatcgccgcccgaatggtagaataagggcataaactacacagaaaacgggaggcgcccgccatgaccgcgcagaacgaaaacaaacgctgcccgcacagcaaaaagtgcggcggctgccagcttcagaacctgacctatccggaacagctcgaatggaaaaaccgcctctgcataaagctgctcgggcagttcgcgcatgtggagccgatcatcggcatggaaagcccgtaccactaccgcaacaaggtgcaggccgcgttcggcacgacgcgcgcgggccgcatcatctccggcatctaccagagcagcacgcacaacatcgtcgccgtggacagctgcatgaccgaggacaaggccgcggataagatcatcacagacatccgcaagctgctcgcagacttcaaaatgacggcctacaacgaggtgaccggccgcggctttctgcggcacgtgctcgtcaagcgcggctttgcgaccaacgagatcatggtcgtgctcgtgaccggcacgccggttttccccgcgcgcagcaacttcctgcgcgcgcttttgaagctgcacccggagatcacgaccgtcgtgcagaacgtgaacgaccgcttcacctcgatgctgctcggcccgaacgaaaagacgcttttcggccccggcttcatcacggacgtgctctgcgggctgaaattccgcatttcggcgaagtccttctaccagatcaacccggtgcagaccgaggttctctacggcaaggcaatggaatttgcaggcctcaccggccgcgagacggtcatcgacgcgtactgcggcatcggcacgattggcgtgatcgccgccaaaaccgccgggcaggtgctcggcgtcgaggtaaaccgggacgccgtgcgcgacgccatcgcgaacgccaagctgaacaacatgaaaaacatccgcttcatctgcgccgacgcgggcgaatttatggtggatatggcgcagaacggcgagcactgcgacgtgctcctgatggacccgccgcgcgcgggcagcgatcgggcgtttctctcctcggccgtcacgctcgcgccgaagcgcatcgtctacgtctcctgcaaccccgaaacgctcgcgcgcgacctgcattttctcacaaagcgcggctaccgcgtcgagaagatccagcccgtcgacatgttcccgcatacgaatcatgttgaaaccgtatgtttggtgtcaagaagaaataagtaagtgctgaaaagcagcgtatttatgggctttttttagattaggcaatagcttatgaaagcccgtatttcttatattaaacacaaagagagatggatgattttgacgaagcgatacaagaaatcttaaaggagttaaaacaaaacaccaagatttcaagcctagctgattattacctagctttgaggtaatctcttgggcgcgttgaaaatgaacttacagtggatatgaatcgtagcattggcaatgaaatgatgctggcctttgcagagatcggaaattactatgcaaagtattttttatgaaaggcatagagaatagtcgaaaatgagtatagcctcacgaaacgtaagcgataaaagcaatccttttagttataattaagtgtgtaaataatgaaatataactttaaggaggtttttactttggaagaaaaattattatacagaagccgacagcgcggcgtcccataagcagacggctggatcgacggaatatttcggggaccgcattccaccggaattccggtaaaatacggccccgctgcacagcagcaccggcttgctttcggccctgctgtgggtactttcctttagttagaaaaacaaattgaaagatttcaaaatcaggcggcgaaggtgctttgccgtgcgatggacgcagaccccatgcccgcatggggccgccgcacttaggaggaggcaagcgatgcagattgaaaacaacatcttgaaatactacctgcaaaacgtgtacttcatcacaggcacggcctacgccgggaaatccacggccgctaagatgctcgccgaaaagtacggcatgatcctctgcggcgaaaactaccacgccgaggtggcggaccgggttgccgacccggcggtccagcccgacctgtgctacatgaagcagcttgaaagctgggccgattttgtgacccggccgccggaggagtacgagcgctggatctacggcgtttccgcggaggccgcaggcttcgaggtcgccgcgctgctgtcgcttcccagagaccgcaaaatcatcgtcgataccaacatcccgctcgcgcttttaaaggaaatctccgactaccgccgcgtcgccgtcatgctctcgccgcagagcatgagcgtggatcgatttttcgaccgcgatgacccggaaaagcagtttttgctcagcgtcatccgctcgtgtgcggaccccgatgcggtcatggcgaactaccgggccggcctcgcacgggtcaacagcccggcgcattacgccgcgtacgcggaaagcggatttttcaccctcgtgcgggaaaacgacggcgccgacacccgcgaggcggcctgcaccgcgctcgccggacacttcggcctgacagattgaacaccgcaccactctgcaccgcacgccgcagccggctgcggtgcttttttctccgccttttcccctaccctttcagacgcgctgcacaccggtcggccttttaccgcgcggcctcgggccctgtttttccgcagcacggctgcgcgccgccgagatacgcgccgccccacgcgcacatcgcgtcgagcacggggataatcgtgcgcccaaactctgtgaggctgtactccgttttcggcggcacggtcgggtaaatggtgcgggcgatcaggccgtcggtctcgagcgcgcggagctgctccgtcagcatcttcggcgtcgcccgcggtacgagccggtgcagcgcgctgtaccgcagcgtctgatccttgagatgccaaagaatcaccgacttgtatttcccgccgatcaggtgtacggtcgcctccaccgggcagctgaattccatcatttttcctctctcctttgcataggcggtacccttttcggtactctatatgaaaatagtgcgttcttgcaaaacggtcgttttatgctatgattgtagcacaggcccgcaggcgctgcaacacagcgcccaaaacactgcgaaaggatgaatacctatgcttttagacatcgccaaaaagcgctattccgtgcgcgattacaacggaaagccggtagaaaaagagaagctcgaaacgattttggaggccgcgcacgtagcgcccacagcggcgaacgcccagcccgtccgcctgctcgtcgtgcagagcgccgaggggcttaaaaagctctcgaaggccgccaatgtatacggcgccccgtgcgccgtgatcgcctgcgcggaccgcagcagggcttgggtgcggccgtacgatcagaaatcgagcgccgacattgacgcctcgatcctgaccgaccacatgatgctcgccgcgacggagctcggcctcggcacgacttgggtctgctactttaagccggaggtgctcgcgcgcgaattcggcctgcccgaaacactcgagccggtcaacatcctcgcggtcggctacaccggccgcgcgccggccgaccccgagcgccacggcaaaacgcgcattccgcgcacagagctcgtcgccttcgagcatttctgatttttccccgcacgccgaaaggaggggccgcgctttttttaccgcgcggcccctcctttattttgcgtcatgctcccgcaagcaggcgggcggaatccgccaaatcggcgagaaaatccccggcgctcacgtcctgatcgatcagctccgggatgccgttcgcccgcgcaaacgcccgcacgctgcgccagtcgagcgcgccgccgccgagcggcacgtggatctgttcgagcggcagcgccggacgcacgtccttgtagtggatcgagcgcagatacagcctcacgcggtcgagatacgcggcgggatcctcgccgccgtacagcacccagccgacatcgatctgcgcgccggccgcacccgcgcagcgctcgagcacgagctccagccctgttttgccgtcaaaatgcgcgcggatctccggccagccgttgtgtatccagagcgctgtaccggccgcttcgagcttctctgcgagatacaggcagtcctctgcaaagcgcagatagccctccgccgttccgccgcccgggcagttgacgacgatctgccggatatggttttgcgcggcgaaatccgccgccttttccgcatccccgcgcgggtcgccgaacacgtggcatgaagtgagcgcgagcccgtgcttttcgagcagccgcgcaaagcccgccgtttcctccggctgccagaccgggttcatgccgcttttttccagcgccgccgcgtccatcgaaagcgccacgcacggctcgatctgcgtgtagccggccgttttgagccgcgcgcagaacgcctccgggtccgcgcggaattcccgcatgcagccgtagatctgtacaccgagttccattttttcaacatccttcccatacgtttttttcattataacaggcgggccgggccgcgtcaatttggaaaatgccggatgaaagtccgtccgcaccgcagatccgcacggcctgcgtgccggccatatttttcccgccgtaccggcgcggaaggcccgcctatcgctcgattccgcaagcgggcatttttacatcaatatagtggaaagaaccgtcaatttggtggatgaaaacgccggcaaaaaacattatgatgagaatggagcgggcggctccggctggtttcgaaacgtctttcggaacgccttgggcgggcagccgaagcgctcggcgaaaagccggtagaaccggctctggctgttgaaaccgcacaggccgcccacgtcgatgaccggcgtctccgtcgtgagcagcagctccgctgcaaggccaagccgcttcgcgttgatgaacgctgtgggcgttacgccgaggtagcgccggaacgagcgcgtcaaatgctcctgcgacatattggcgagcgccagcagccgcggcaggcccgcgacgaagttctcccgctcgtccatttcctccaaaaggcccgaaagccactgcggcagcagcgcttccggcgcgggcgcggagaggaacagcccgacgagatacggaaaaatgctgtgcataaaccggtagccggcctccgggtccgagagcccgcggcttttcagcagcttgcgccgcacgtcgctgagcgccgtgcccgaaagcatgcagtgcggggaaagcgccggcgcgtcgaataccgcgcggtccacgccgaggtaatcgcagacgcgcaggaagagcgtttcggggatgccgatatcgatgatctcgaaatcgtcggtgttgaagagctcgtagcggtgcacgtcgtttggacgaatcaggacaaacgagccctctgttaaaaactgcgaccggccgttgaccgcatgcacggcgctgcccttcggtacgaggaacagctcgtaaaagtcgtgcgtgtggatcttgtaggtggcctgcacgccgaactggtgcagcgcttttgcgccgtcgcggcgcagctccgcctcggtgtagtgcagccgcacaatttcctcgcccatcgtatcccccctttttcatcccctttattataggcaatccgcggaggaaaaacaagactccgcatcaataaaagagaatttgagtcaaggaggctttctctatgttcaagagtgatctgcaaaagctgcgcaatgcgctcgaattcacgcgcatctacaaggaaaacagcggcgacatctacatccgcgaggccaagtgcctcgatttccagctgcgccgcatcctcgtgccgctcgacgaaagcgacggtatcgcgggccgctacgagcacgattttgccggcttcacctcgcaggtgggcggctattcggcgctgatcggcggccagtacacctactatttcaacgatttcgacttcacgcgtgccatgctggagcatgcggacgcgctgaccgcggaggaaaagcgcgatctgcaggctgcgcaggccttctggcacgaggaaaacaccgcccgcaagctcgatatcgcgtttgcaaagcgctacggctacattccgccgaagggctatcagggcccgggcgccggcaactgcgactgccgcgtcgccggcacgaacgtcgattttgaaaagctgatcgcactcggcttcgacgggctcgaccgtgagatcgacgcggcggcggagaaaaacggcgcatcttcgttctacgacgcgctcaagctgtggatcgaaagcctgcgcggggcgtgcgcgcgctaccgcgagcaggcgctctccctcagcgaaaccgccgagagcgagccggcgcgccgccgcttcgccgcgctttccgacgcgctcctttcgatccagcacaacccgccgaaaaccttcctcgagggcgtgcagctcatgtggatctattcggtcagctccgacctgatgaattacggccgcatggacgactacctcggcgggctgtacgccgccgacgtggacgccgggcgcatcaccgaggaggacggcgtgcagatcgtgctcgcgctctacaagcatttcaaggagatcaacaagatccacgactgccgcgtgatcatcggcggcctcggccgcaaacgtcccgaagcggcagaccgcctcgccatcgtcatcatggaggcttcccgccggttccgcgaggtcgtgccgcagctcacgctgcgctactacagcggcatggatgagcgcgttttccaaaaggccatggaggtcaacgccgagggcacaaccttcccgatcatctattccgacgatacgaacatccccgccgtcgaaaaggtctacggcgtctcccgcgaggaagccgagcagtacgtgccctttggctgcggcgaatacgtgctcgtcggccgcagcgtcggcacgccgaacaacggcatcaacgcgctcaaggcgctcgaaatggcgctgcacaacggcctcgacaaattccagaacgtgcgctgcggcgtcgaaaccggcccgctcacggcgttcgacaccttcgaaaagctctacgccgccgtgctcgagcagctttaccccgtgatcgaccgcttcgccgtgcagaaatacctgaactacacggtcgccggcgaaaacgcgccgtacctgcacctgagccttttgctcgacgactgcatcgcgcgcggcaagccggtatttgaaggcggcgtgcgctacctgaacgcttcgagcgagatgttcggtatcatcagctgcgccgacagcctgacggcgatcaaaacgctcgtctacgacgggaagcgcttcacgctcgaacagctcgtccacatgctcgactgcgatttcgagggctttgaagcggagcgcaaactctgcctcgaagcgccgaagtacggcaacgacgacgacgcggccgacgcgatggcggcgcgcctcttcgccgacctcgccgaccgcacggtcgaggcgggcaaggccgcggggctcgaccattataatatcgtcagcgtcaacaactcgatgagcgcggagtggggcagcctctgcgaggcctcggcctgcggcagaaagcgcggcagtgcgatggcaaacgcaaacggcgcttcgatcggcgcggataagagcggcatcacggctctgctcaactctatgtcgaagttcgacaacacgaagcacgtcggcgtcatcaacaacgtccgcttcacgaaggagcttttctcgggctcgatggataaggtgggcgcggtgctcaaggcgttctacgaaaacggcggcgtacagacgaacctgtgcgtcatcgggcgcgacgacctcgaaaacgcgatggcgcacccggagaattaccagaacctgctcgtgcgcatcggcggcttcagcgcccgcttcgtcacactgaacccggtcgttcagcgcgagatcatcgagcgcacaacctacggcgcttaacctgcgcgccagagggtggggcacggcgggcacgcccgcttccccgccccggcaaagcgggacaaacgccgcgcggcatggcgcgcttcttcgcgccgtccgccggcattgtgcccgcacaaaccaaataccgaaaggcaacctatgaaaagtttgatttttgatatccagcgcttctgcgtttacgacggccccggcatccgcaccacggtattttttaagggctgcaatatgcactgcgcgtggtgccataatccggagagcttttctcccgcaccggagcttctttaccgcgccgaaaaatgtgtttcctgcggcgcatgcgccgtttgcccaaacggcgcgcacacctttgaaaacggcatgcaccgcttcgaccgcacaaaatgcaccgcctgcggcgcatgcgaaaaggcctgccccaacagcgcgctcgagctttccggccgggaaatgacggccgaagaggttctgcgcacgattgaaaaggacgcgaaatactacaagtcctcgggcggcggcgtaaccttctccggcggcgaagcctccctgcatttcgacctgctcgtggagcttttagaggcctgccgcagccgcggcatccatacggcgctcgaaacgaacggcctgatcccgcccgcgcggctgcaaaggctgatcccgctcgtcggcctgtttttattcgactgcaagcacaccgacccggacgcgcacctgcgctggaccggcgcgccgctcgagccggtgctcgacacgctgcgcgcgctggatgaagccggcgccgccgtcgcgctgcgctgccccattatcccgggcgtgaacgacacggacgcgcatttcgcggcggtccgcgcgctcaaggcgcggcacgcctgcatccaaagcgccgagatcatggcctaccatgacatcggcaaaaccaagtgggacgcgctcggcgccccctacacactcgccggcctcaagaccgtatcgccggagcaaaagcgcatctgggaggcaaagatcgccgactgaccgctgtattttggggaatttcataggaacggcgcgctgcggggagcttatccgcggcgcgccgttccgcttatcctgaaaattcaggtaaaaaatttgacagattctgcggaatattgtatgcttaaagcaattatatcaaaaggaggacagcctatgttttgcatatattgcggagcaaccttgcccgagggcgcgacaaaatgcgacgtctgcggcagcgaggccattctgcctccggcagagcctgcgccccccgccgcgcccgcgccggaaccccctgtgccggagacacaagacacagcggacggcaccgcatccccggccgcagaagagcccgccgaggcgcccgcaccggatgcaccgcccgcagatacggaggaccacgtggaggagctctcctccggcgagcagctccccgagccgccgaccgtgcacagcagcaccctcgccgcgcaggcagacgcgcccgtgccctacgaggacaactacatctacgaggaatacgaggacgagcttccccgcagaaagcgctcgctcaaatggctttggatcgcgctgcccattgcggcggccgtgatcgcgacggttacgggcatcgccgtttggtttaacgcgccgatgcagaagctcacccgcgcgctcgacgcaaacgactacaccaccgtgacgcagcttctgccccagctttccgaggaggagcttcgcggcgtggcggaggacatgaaaacgtacgccgccgcggtgatcgaccgctacaacagcggggaaacggactatacgagcgcttacgagctgctcgaccgcctgcgccggctgtttccggacagcgggctcgacaacgatgtgaagcgcatcgaggcgctgaaggcctcgaaggacgcgtttaacgaggcgcagtacctcgaggagagcggcgaagccgccggtgcggtcagccgctacagcgccgtcattgcggacgacacaaactacgaggccgcgcagaagcagatcgaggccgtgcgcgccgcctacaaggagcaggtgctcgaggaggcgcaggcgctcgccgacagcaaggattaccgcggcgcggaggccctgcttctgaacagcagcgacgtactcggcgacgatgcggacatcaccgcaaagctcgaggagctgaaaaaggccgagctggacgactacgtgggcagcctgctcaagaccgcgcagggctttgcctacgaaggcgattacgccggcgcaatccagcttctggaggatgccacgaaggaagacgagcgcttcacaaagcagatcgaggcctacaagagccagtacaaggaagctgtgctcaaggaggccgcgggctatgcggaaagctccgacttcgaggccgcggtggcggcgctcgaaaaatcgcaggagcttctttcagatgacgcggacatcgcagcgaaaatcgaggaatacgaggcgatgtatccggttttgctcgccgacctttcgccgagcggcggcatggactgcgcgaccggctggacggcgtccgacgcctccggcaacagctacggcagcggcctgagctttgcgctgtacccggtcatccagaaaaccgttgaaaccgaatacgaaccgggcggccagtaccgccgcctgagcggcacatgggtgatcgagggcgacagcgcggacgacttctccgccgccgtgcgcgtctatgtggacggcgccctgcaatatgaggtcacgggccttacgcgcggcgattcgcccgcagagatgaacctcatcatcgacggcgcggaaaccgtgcgcatcgaggtggagggcagcttctcctcgctccgctcgacgggctacgtctatctcgccgacgcgaccttcggcaactgaccgttgaaagccacagcgccgcgcctgtcggcgcgcagccgcacaccggcgcatgagaaaatcccgcagacagctaacagatgctgtctgcgggattttttgcacctttattcggccttgacgccgagcagggaatcggtcgaaacgccgtaaagctccgcgatgcgcacgagaatcggaagcgtcggcagcgcccttccgttttccatatagacgtagcgcacacggcggatctcgagctgcttggcaagcgcctcctgcgtcataccgtgcttcttccgaagctgccggagcctttccccgagaagaatttgatcaaacaggctgcacatcccctttccacttataacgcttttcgcgttattcccattcttttccagttacaaacattataagcaacggcaaaataaaagtcaatacgccggccgatataacttgaagcgcgttgctccaattcttaaagcatgttcataagtaactcgaacaaaggtatactaacgctataagaattagaaagcgtgatggctatgcacggagcagcacaaaaggcaatcggaaagcggattaaggaataccgcgaaaaatgcggcctgacacaggaaatgctggccgaaaaaacggatctcacgccgaattacatctccgctgtagagcgcggcatcagcttcccgcgctttgaaaagctgatcgcgatcatcaacgcgatcggcgcctccgccgaccagattttcgcggacgttgtggaaaacacggcggcaacgcgctcctccggcctctccaaggaaatcgcgcggctcccgttccgcgaacagcagcgcatcttcgccgtggtggaaaccatgatcgccgaggcaagaaaggcataaaaaatacccgcagagcctgcgccctgcgggtctgattcttttcgtttttcctcagtccttcagctcgaacatcgcctcgatctccacggggaggttgccgggcagcacgttgacgccgatagccgagcgggacgggatgccgatctcctcgccgaaaagctcgccgagcagcgcggtcgcgccgttcgcaacggcgggctggctgtagaaatcgttcgcgctcgcgacgaaaacgaggatcttgacgcagctcttgacgcggtcgaggtcaccgatctccgccttcagcaccgagaggacgttgagcatcgcgtcgcgcgcgtactgctggccctgctcgagcgtgaaatcgaggccgagcttgccctcgaccggcgcgtcgatgacgcagccgcagcccgaaacgtacgcgaggttcgcgccgaacggcttgcaggacttgtacaggccgccgcgcgggggcgggggcgggaggcggaggccgagttcttcgagtttcttttcgatctgcatgaaaaccatcctttcaaatttgcgtgaaattttcttttatctctgcgccctgagccattgcccggggcgttttcccgtcagcttgtcgccgcgcacgacggcctcgccgccgatcaggctgagcgaaaggccgctcgaaaaatcgctccgcccggagaaatccgcgttgtccgtgaacgcgcgcgggtcaaagagcagcaggtcggcgcggcagccgggggcgatgcgcccgcggtccgaaaagccgaaccgctcagccggcagcgccgtcatcttccgcaccgcctcttcgggcggcaccacgccgcgcgcaaacgcgtactcgcgcaggaagcgcggaaatgcgccgagcagccgcgggtgcggcgtgtccgtcgcggcgtaaagcgcgtcggagatcagcatcgaatacggcaggcgcgccacggcgtcgacgtccgcctgcgccatgctcaggttgatgatcccgcagccgccgccctcggtgtgcatcaggtgcgcggcgagcgcttcggcgtccgggaagccgtaccgccgcgcgccctccgccacggaaaggccgaggaagcgccggttctccggctgcgccgccgtgccgaccaagatgcggtcccagccgagcgaaacggcgtagttgtcccagtccgcatacgttttttgcaccgcgcggcgaaattcctccacgcccgccgccgtgccgagccgcgcacaggccgcgtccacgccgtccgcacacagcgccggcggcagcatcgtcgtgagcatcgtcgagccgccgcagtacgggtaaaaatcgcaggtcacatcgagtccgcgggcgcgcgccgcctcgatgcggtcgatcgcgcggtagatctcgcgcccccagttctgcatgccgcaggacttgaaatggctgatctcgagcgggcagccgaccgattcggcaatgcggatgacctcctcgacgctctcgacgaggccgtcgccctccccgcggatgtgcgccgtcagcgggcggccgtattttccgagcgggcgcagcatcgcggcgtactccgaaaagctgttgaagcattcgggcatgtacatgatgccgcaggaaacgccgggcgcgccgagcgagagcgcctcctccacacaggcctcggcctgttcgagctccgccgctgtgaacggcgtgcgcgaaaagcccttgaggctgatgcgcaccgcgccggtgccgatcatcgccgcaaaattcagcggcagcgcggcattttccagccgccgcacgtactcgcggtacgtttcgggcgcgcccgccggcaccgggccgagcaccgcggccgaaaatgcgcgctgctccgcgcaaaacggcgcggcacacggcgtgagcgagatgccgcagttgccggaaaccgacgtcgtgatgccctgccgcagctcggcctccgcgctccagccaaggagcggctgcacgtcggcgtggcggtggatgtcgatgaaaccggggcagagcattttgcccgcggcctcgagcaccgccgcgcccggcggcgcgggcaggcccgggccgaccgcctcgattgtctccccctgcacgagcacgtcgcccaaaaacggcgcgccgcccccgccgtcataaatctgcgcgccgcgtatcaaaaccaccatgcgggcgcctccttccccaccagcttgaattccatttcactatactgtatccgggcgggaaagtcaagggatgcgcgggcaaaatcccgcggcttgacacggcgcgggcggcggcgtatactgaacgcaaatgctgtgaggaggccgaaccatgcaggctgaaacgtaccgaatcgaaaacgagggggagatcctttcccccgccctgatctattacgcggaccggatccgcgagaacacgcggcgcacgatcgagatcgccggcggggccgagcgcctttggccgcacgtgaaatcgcacaaaatgcgcgcgatgctcgaaatgcagatggaaatgggcgtccgccgcttcaagtgcgcgacgctcgccgaggctgagatggcggcagaagccggcgccgcgcatgttttgctcgcttacccgctcgtcgggccggcaatcgcggccttcgtctcgctcgtgcagaaataccctgccgtgcagttttacgcgctcgccgacgaccgcggcgcactgtgcgcgctcgacagggaagccgcgcagcaaaacgcctcgttcggcttttttgtcgatgtcaacatgggcatgaaccgcaccggcgtggaaaccgcgcggctgtacgatttcatccgcgccatcggcccgctgcaggcgctgcgcttcagcggcctgcactgctacgacgggcacgtgcacacggccgacctgctcgagcgcgaggccgaggtcgccgagatggtcgccgccatcgccgacgcgctcgaccgcctcgaggcggtcggcacggagatcccggcaattatcgcgggcggcagcccctccttcccctgccatgccgccaacccggacgtttttctctcgccgggcacggtgtttttgtgggacgccggctacagcgccgcctatcccgacctgccctttaccccggcggccgccgtgctgacgcgtgtcgtgagccacccggccgacggtattttcacgctcgacctcggctgcaagggcatcgcaagcgatccggccggcccgcgcggcgttgttgcgggcctcgaacatgccgaagcgctcttccagagcgaggagcactggacgtaccgtatgctgcccggccacgaagccgagcgcccggcgatcggcgccgcgttctacgtgatcccgacgcacatctgcccgacgacggcgctttacagcgcggcgctcgttgcggaaaacggccggatcaccggccgctggaccgtagacgcacggcgctgacgcgtctttcccccgcggtccttcccccacagacagaagccccgtgcgccctgcgatccgccgcaggcgcacggggctttttcattccgccgtaaacgtcatgttcgggaacagcgccgccatggtccggtcgtcatacgccgcgtccagccactgcgcagcggcgctcgcgggcgccgcgccttccgttctcgaccgccaccgggtgacggcggccgccgtgacgaggaggttcaccgccataaagaccgagacgcacacgcaggcgacgcgccagcctttgccgcgcattttggcgaacaggcggctcagcagcggaaacagaaggcgcatgaacaggatccccagaacgccccacagcagcgccatctgcaggctcacgcgcccgccgatgttcagcgcgtggtcgctgtagtcccaggagacggagccgaggacaatctcctgaatcaggctgccgaagtattcgaccgccgcgccggagacggtgaaaaccgcaaactgcaaaagaacgccccggtttttcagaaacgccgaaagcaggtaaaccgcgacggcgccgacgccgtagatgatgcagaacggcccccagattgtggcggaatggctctcccacctgcccgtgcgcaaaacgcaccagaggccttcgagcacaaagcccaccgcgctgccgatcacaaacagccacaaaagcgtggcatagcagacgggcgcggcggccgtctgctcccgcttgcgcgtcatcgtccctgtctggtgaagcgaagctgttccggcattcatagtcgttctctccctttccgtcgttttctgacgaaattctacaccggggctgttatggaattgctggaaaaatgtttttgagatattaaaaaacggcccgccgcttgaatgcggcaggccgttcgcctttcacgccctctgctccgcctcataggcgaacagcgcgggggcgatgtgcgggtatgtgagattttccggaacggtttcaaacaggcgggtttccccgatctcgctctccggcagcgggccaagctttgtgatctccgcccggaacacagcgcccgaggaactgccgaggccgtctgcagcccggtagtcgcacagcggctcgatcgtgtattccagcgcgccggattcctcccagagctcgcgctttgcggcctcgagcggcgtttcgcccggctcgatgtgcccgccctgcgtctcccatgtcgtgcgcgcccggtggcggctcaacaggtatttgccgtccatgtgcgaaaggatcacgacgaatttgtattcccccagcgtgttcgcggggaaaacctcgcatgttttcaatgcagccactccctcgattctgtctccgcccacaggtccggccccgtcggcgggcaatgcttcccctttattataccgctgcgcgggagcggctgcaagccctgtgcggcctgttcacgcgtccttttcgttccggcgccggagcacaacgtaggaaatcacaagcggcacgagcacggcgacgcctgcgacggtataccagagcggcacgcgcatgtgcatctggttgcgtatgaacacgcagcccagcatgaagatcaccgcgatgatctggatcgcccgcagcacggccttttcgtaatccgggcggtgcaggcggcggccgtacgccgccttgaaaaagccgaccgcatctgccgccgcgcggtcggccccggcgtccggcgccgccgtttcccgctcggcatggagcagccctagaaggctgaccccgagcgcctcggcgagcggctcgagcgtgtggatatccgggtagccgagcccgcgctcccaccggctgacggccttatccgtaacgtgcagccgctcggccagcgccttctgcgtcatatttttctccttccgcgccgctgcgataaacgcgccgaatttttcagcatccataaaccgacacctcctgccctctattctagccgccggcccgccggtttgcaaccgatcgcccgttgatttcccccgtttcgcactctacgaatcgtttaccgcagaaaaatcccgtgcaggacgcgctgcacgggaaaatttcacctgtattcggtcgcgaggcggatgcgctcgtacggcgtgtcggactggatcgagcagtccgcgccgaggatgaagccgctgcggccggtctttgcgcacaggcggcggatctccgccttgagctcgtcgtccgtgcccttgtacagcatgccggccggcgtattgtccagcccgccgagcacgcacttcacattcgggaagaaatcgcggccctcgcgcatgcccatcttttcgacgtataccgcccagttcaccgcggcggcctcgtaatcctgccagacctcaatgttgttccggtcgcccgcccagccgcagcagtgcaggatgttgaactcgccgagcgtattcgcgtaatcgagcactgctttatccgacggcgtgatcaccctgcggtattcctccaccgtgaagcggtttttctcgccgccctgcacactgtagtaaatgccgtcggcgccggcctcaaagagcgccttcacgagcattttgttgtcctcggcgatcacgtcgagcgcatggcagacggccttcgggtcctcgcgcagcgtccgcatcacaagctcgtcgccgtagccgaagcggatcgaggaaaacggcgcgaacacggtataaaatacgagcgtctccccgccgacagcctcggcgatcgcacgcgtgcgctcgacctgttccttgaaaaacgggtgctccgggcccatcggctcgagcttataccagtccgccgccttttccacctgcagcgggttcgggtagtcaaagtagccgtcgcacatgatcttcatcatgtcgagatcgcattttttaaaataatcgacgtgcgcgtcgatcgcgccctgcccttttgcggcctcgccgctaaaatggaaccagaatcccgcgggtacgcggtccggctcgccgccttttaaagcggtgatcacgcgttctctcttgttcatttcaatacgcctccactcccgcacgcaatgcggttgatatgctttcactatatcccataaaaacgggaaagtcaatgcgtattttttgttttttctcgccgaatcgcggtcgataccgcggcacggcggaacccgtgccattctgcggccccaaacacggaaaaggaggcaccccgcggagtgccccctctgtatcagccgcttacggctcgatcttccacgtgatgccctgcggcgtgtcggtgacaacgacgcgccgcgcggcgagcgcatcgcggatcgcgtcggccgttgcccagtccttcgccttgcgggcctcggcgcgctttgcgatcagcgcctcgatctccgcggcctcctcgtcggtcacgccctccgggactgccgcctttttctccgccgcctcctttgtaaggcggtcggcggcctctagcaggccgagggagagtacggcgtcaaactcgccgatcagcgcgcgcttgtcgctgtccgagagcttcgccttgaacacgtcgtacagcgcggtcagcgcgagcgaagtgttcatgtcgttctcgagcgccccgcggaactttgcgcgcagcgcctcgcagcccgccgcgtcgtgcgctccctccgccttcagtgcggcgatgcgcgagacaagcttgcggtaagccgtcacggtattgtcgaggctctcgaacgtgaaggtcagcggcttgcggtagtgcgactgcaagcagaacatgcggtaggcgagcgggtcgtagcccttttcctcgaggtacgaaaccgtgaggaaatcgcccttcgacttgctcatcttgccgcgcgcgtcgttcaggtgcagcacgtggaaccaatatttgcaccacgggtggccgagatatgcctcgctctgcgcgatctcgttcgtgtggtgcgggaacgcgttgtcgatgccgccgcagtggatgtcgaggtattcgccgaggtatttcacgctgatgccgctgcactcgatgtgccagcccggatacccgacgccccacggggaatcccacttgagttcctgatcgtcgaacttcgacttcgtaaaccagagcacgaagtcgctcttattgcgcttgttttcgtcctcctccacactgtcgcgcacgccgacggcgaggctctcctcctccatgttgccgaacacgtagtacgtctcgagcttcgaggtatcgaagtagacgttgccgcccgcgacgtacgcgaagcccttttcgacgagcctttcgaccatctcgataaacgtgtcgatgcagctcgtagcgggcacgacgatctccggctttttaatgccgagcttttcgcagtcggcaaagaacgcgtcggtgtagaattttgcgatttccatgaccgtcttatgctcgcggcgggcgcccttgagcatcttgtcctcgccggtgtcggcgtcgctcgaaaggtggcctacgtccgtgatgttcatcgcgcgggtcacatcgtagccgaggcagcgcagcgccttttcaagcacgtcctccatgatgtacgtgcgcaggttgccgatgtgggcgaagtggtaaacggtcgggccgcaggtgtacattttgacctttccggcctcgtgcgggataaattcctcttttctctgggtgcgtgtgttatagagctgcatggcaaataccgtatcctttccttatgattcttcggtttcccctgtttttttcttctcgagcgtcccgcgcatgtgcatgagctccacgcgcaggcggcacatctcctgtgcgatcggatcgacgacgtggatctgatccagcgcgctgttcacgggcttgccgcccacgcgcacgacccgcgccggaacgccgacggccgtggcgtcgtccggcaccgcgttgagcacgaccgcgccggccgcgacgcgcgcgttatttccgacgcggaacgggccgagcaccttggcgcccgcgccgacgagcacattgtcgccgagcgtcggatggcgcttgccgtggtccttgccggtgccgccgagcgtaacgccctgatacagcgtgcagttatcgccgatcacggtcgtttcgccgatcacgacgcccatgccgtggtcgatgaacagatttttcccgattgtcgccccgggatggatctcaatgcccgtgcgccggcgggcgcgctgggagatcatgcgggcaataaacttcatatcgcggcggtaaaaccagttcgccctgcggtaggcgcgcaccgccttaaagccggcatagaggaaatacacctctgcccggctgcgcgcggcggggtcgcgctccatcacggcgtccagctccgctttcagcttcgaaaacaaacgatcatctccttaaaagcaaaaagccccgaacgcacaaaggcgctcgggggcgaaaatacgcatatgcgcatcaaatccgcggttccactccggtttatcacttgaaacggcttaacgtgccgacgccgtacgcggctcacctagggctcaccgcatccgctcgcgaatgcacttcgcccggcgcctccctgcggcagctttcagccggcggccgccgctctctttcggtcgcattccgggttactcgttcggtcacagcgtttttctatatgccttattctaacacagccgtccgcaaaacgcaagcgatccgcctgcaatattttatgcggcggcgcggaacgcgtgactgcaaaagggcttgcgcaaaaaagcgccgggcgcagtctcccggcgccggcgcttttccgtcattttttacggtatgcttttttccaccgggcgcttatagctcagcgccacaacatacgtggaattgtcaaatgtcgtcaacgtaatttccaaaacacagctttccgaaaccgcaaacgcatccgcggcattgtgcggctcatccggtgcctgcgcccacttttcatacagcgccgccgcttcgtaatccgcaagcagcggtgtatcctcggagaccagataccgctcccgcaaaatcgaatccccgtacgccttcccgctctccgccgcacgctttttcgcgaagtcgagcgcgtcggaaagcgcctgctccccgccggaaaaggcgaactgatattcgaactggagcagctcattttcaacaaagtagaggtctgtgcgatccgccgtgcgcccgtaaagctcgactgcatcgatcagccggtaattgtccggctgcccgagaatcagctctgcatccgtgtcgaaattcacgccgaacgcttctgaaaacgtctgctgatctttttgaaatgccttttccagcacattttccggcgtcatcggtgtcccgtcattcgcggacgcgcaaccggtgagcgccaacgccccgcataagacacatacaaaaagcagtgcggccgatcgcttcataaatccttcactcctttagttgatacctatcgtgaaaaacctcagtcaaaaataattacattcctattggtcaaatcccatcggccatttactgtagcttccatgacaaggaagatacccgaaccatatcctccgcgcgctattttataaccgctcgggataccaccagtcgcagagtaagtgacatttgcgttaggattatttacaagcttataaatgttataaggataatctgcttctatgaaatttccgtttgaatcatacaaaagtcccaccgtctgcaaggccatattaattgaagaaaccggaacatatcctccattgtatgtatagtgaaaagctaatccctgtggattcataagaactaaatcaacaaaaggatatgtacctgtataatccagagaatactgtccggttgcagaaattgtgatcgtttcatcaccaggtttccaagtaaatgtctgcattgcacgtgcattcggattgatttcaatgggggcatcaaccctatttccttcatcatcgtatccccaaaggaaatattcagtgatttcatcctcattttctttcaaaacttgtaaagttgtttgtgtccccacagaatcatgggctgaaactgcaataagacgatcaccggcctgcgtctgaatcccgttcttagaaagatacgcttttaaatcattatccgcataagctgcatccatcgatgcaagtattgtatgatctgttcctgaaccttgataagtctcaacttcttgagccgatacagcaacactaaaagaaaccattaacattgtcaaaactaaagagaataacttttttcatacttaaagctcctttgcgattttttacatcaaacgccactaaatccacatggtatctttctttctgcatcggtatcaccactttccataaaatcactttttgcttggcacttttaataatttagttattacatattccctcataaaagtcaatatattatggatatattttagaaatttttttcaatttattgaacagaatcttattcaaagaataaatatcccccggcgaagccgggggtatttcatatgcgggcaaagccctatattactagcggcacgtgtcacgtcacgttggtacgatctggcagccgcgaaaagtttgttacttgctactcgtaaacgagtcttttagaagtttcccatcgtcagctgttcccctgctttgtcttcttctaattggttttgaatatattcttgtatcttttttgcatttttccctgctgtgtccacgtaatatcctctgcaccaaaattcccgattccgatatttgtatttcagctccggatacttttcgtagatcatcaggctgcttttccctttcagatatcccataaagcttgatatcgctactttcggcggtatttctaccagcatatgtacatgatcgggacatacttctgcttccacaatttttatctttttccattcgcaaagtgttctcagtattttccctacctctcgtctcttttctttgtagaacactttcctcctgtacttcggtgcgaatgctatactgttctaaatcacacatcagcggcatataagtcgctaccggtataaggaatttcccatctatgtactcggctgcgccgagtacgtcggaataatcctccgtggcgcaacctttaatatacacctgacacttctgtgcagagccgtccgtagtaatataaatccgttcaactatcgaatgaattaaagtgaataaggtttccggctgtgtgtcttttgcaaattcttcaaaagacagcagccgttttttcataccgttcaactcatggatgaggtaatgattttcagattgtgtatcctctatgcgtcgcagatcagcctcccgcttagcaaggtcatctgtaagcacttttatatcatcctgaataaagcgtttgagggcatcgtccgcctcacgcaaattgcgcacctgggcagcaatgtctgcatttaagcgttcaatcgctttcttcgtttcctgatattctttttcactctggtcggtgcggatcatgctggcaacccggttttctaaaagctggcggtaataatccgaatgttcttcttgcaggctggaaagtgaatgaataacaaactcatccagcgtgaccccctcaactcctttgaacgtacactctttagctctcaccccagggcaagcatatttgaaacggggcttcccattcgtccagcggtttgattcgggcagaacccgcagccgtttaccacaaatgggacagtacatcaaaccagacagcagagcgttggtctttctgtgaggccggttatatttttcggcaatctcatccagaatattttgggtttctatccacttgcgggaactaataaaaccttcgtggcggcctacggaaacaatccattcactaatgggctttttgttgaggagctgggaaaactttggattaaagaaagtggaatcttcatcctcaactttcatctggtcggtcttgttataggcggaaagtccatgctgtccatcgaactcggctggatctccaaacaaattcccgtcatgttccaaaaagtagttataagaacactcatcggccacacagtagatgggattacgcaagatcagccggatggtagaggcggtgaatttcgcaccgcgctttgtttcatactttgcgctgataaggtttgccgtttgcagcagggaacgggtttcccaaaaggtgcggtagatttccagcacaatttctctttcttcctggatgggtacaagaaagctgacggcgcttttattttttccactccctgttgttacacgcttggatgaaaagcccgtgggtgtttttcctcccagccatcgcccatccttagccaattccatcaagttgtcctgaatacgttcagtaaggatgtcgcgctcgaactctgcgatgatagccagcacttgaataataattttggatgtgctgatccgtgtattgatattgttggaacaaaccagaagcgtcacatcatggcgctcaaagtattccagaagccgcataagatcggaagtctttcggctgatccgatccagcttgtaacaagctactgctttgattttccccatctcaatatctctaagaagcctctgaaagtcgggccggtcggaatagtaaccacttaggcccttatcttcataccgggtgaactcataatcttctggtaaggaaagctggttgacagcataatcggcgctctgcttaaactggacgccgatactgtcccctttatttgtaatgcgggatttcctcgcatagatagccaccagcctatcatcaataccagtctggattctcgcttttcgtttcatattcaaaattcctcctttccagggcggctgcaaaccgccctttccttctttattataaaatcggcctcatttctgctcaaaggtgcgattttcgctttttaaggctgaaagcagcgcctttaattcttccgcgttaaacttctgcaattcacgggacagaaattcagcgcgcttctctgcaaactcacgtaaagatttttcactttctttccctgtgtgaaatacaatctccataggctgcactcctactggtctttccgcctgaccacttcatagtcatagccggggcgctggctgcaataggtgcagatgtcccgtttctgctgcgcggggtttactctcctcaaataataagagcctgtaccataaaagttattggcacaggccgggcaaaggcacatgattaagttttcgggaacctcctcgatcagccccacactgacggccagggcatggtcgatcctgcggatgtgcttttcctccagcctgccgatgtacgtctccagccgctttttatcaatggtgcgaagctgctctaaaaggacaagagagggcagctccaggccgctctctgcttttaacaggtagtgggtggggagcttggcctttgcgtccaccttgctggagatagcagctacaatgacggtggggctgtatttattccccgtgttgttttggatgatgacaacagggcgatagccttcctgttcagaaccgataccccggcccagatcggcatagtacatatcgccgcgcaagtatgttttgttcatggtatttgacctcccttttgaaaattaggcggcagaacccgcctatgtagaggccgtacagcaaaacagaatgaaggccggggagagataaaacaatcctcctgttttccattggcctgtcctgctgcacggcccatatttcaaagcaaacctatttgtcctcgacgccccggttcgctgcgggaagtcatcaaacggctggcggcttgccagctccacggggaatcgcacccctcgcgtggttctcacgcaaccgcccccattgcctgcgacggatcacggcaagagccgcttcaacgctcggacgttaggctggacgggagtatcattgtccccgctgctggtcgtggccgtaccgggagccatccggtactggcagcctgctgtttctcgctccttgccgggaagaacaaaccaaagacctacttttctttttcggtggtgtctcgttgttttcttccggcagatcgccgcgcagcagccgcctgggctttggctttcgccaaagcagcgggaatgtgcttgatgattgggtattcggttttcaaggttccgggagaggccaaaaagaacctctcactctatttgccgttgagtgagaggtctgcacaacactattccaaaagttttttaagtttttttagaaccttgattttccgcacatggacagcgttgcgataaaggccgagctgtccggcatattcccgttctgtcttttcctcgtagaacagggcatagattaaatcccgttcttctttggtaagctgtaaaagcgcggtatgtagcttgtccaacgtaagttttcggaacaccacatcctccacgctttccgcattggctgcaaactggcgggcgttttcctccattagcctgtccagggaatcctcccggctgggaagaacctgcctgatctcaccgttgctgccataaaccgggcgctcacacttcaagtcattctcaaagtagcgcattttccggtcgccctgcatataggcggcatacacttcatccgtgacctcgataaattggccgcgaacccatattctttttttgccagcgtccacgctgtgtacctccgtttcgtctgaatttcgagaagaaatccagacggacggcggccccctgcaacgtggaaggcttgtctttccggggaatgccagaaatccgcatttcccgacaaagaaaaagcgcacacaccaaaaggcgcgtgcgctcggctgttggcttttgccggatgatgggtaaggcccggagaaaagaaaaaagtctgtcgaacaaaaaaataccgcaatccccgtaaggactgtggtatgtacgaaatacggtttttgtttggttttgggcggacagccgcccggcttttttctttcaggctccatactatccccttatggggataagctgacagacatcaccacctttccccaaactgaaatgttgataggggtagtataatgtataaaaaagaggaaacagcgaggtttcaaagaggacttgtatagtttcatcgcaagttcagacacgccttgtgtgtgatttgtcaaacacaaacgacaaggtgtgagatttgaaaaatcctcccgaatggcctcaccttgagaaaaagaaaaagcgcagccattcagactgcgctctgtgaatatttaggaagttgtttgaaagcgatacccaacctcacggacactttctataataaaagggtggtgcggatcagcggaatagagctttttgcgtagattgcgtacatggtagcctatggtgcctcgttcatttactgttagagcttcgccccacaccttttcatagatttgggaataggtcaacactcgtccattattaactgtcagcaggcaaagtagactatattcctttgccgttaggcccacttctttttgattgcagcgtaccagcctttggctggggtcaatttcaagatcggggagagatagcaccggttccgaggaaagctcccactttttcagttctgggtgaagttgtaaaaacgagaggaaatcttcaaaaatttttttctctttctccttcaattctaatataataatgcatcctacagtgatcaccttctttcaagtctctctttataaaacataaaacacataaatacgataaagtgaataacttattacagtcacaggaaatatacttacatattatcatttttatagctgcgaaaattcattttcttccctacacttctgtaacagaaaaatgcgaacagcccagtaatcgctgtaatgagcaatattccacattgtttctttgaaattcgtttcgtattagaattttccatagttgcctcctattctttctcttttgagtttaaaattccagaaataccagagaaaataataccaatagcgattgctataagtgctacttttgtcagcactccttcacggctgataaacataaatgtaaaaatagcaaaaagtccgaataatatcattagaacatataataccctaagaattgtccttttcattttcggtttcctccttctgataatcataaataaacagcgtcaatgttccagactggccctttgcctcaaaggtgtgggtatgctccccgcgccgtttcattccacgatgttcatagaaggggtaattacaggtagtgtctgtgaacaggaaaaagttgttgatctgctggcccttcatataatcctgcgcggcctcaaacaacttttttcctaatcctatccctctatatttggaattaactgcaaaaaacgctacttcgccctgataatcaatcgggctgtcttttaataactgttcgtcaattttttctacgctggaaaagatttttgtaatcatgcggccctctttggaaaagaacagcgataccacggaaccgatcaggttcagacggaagcgtaaggggcatttgtgatcccggcgatttttcaccatgataattcctaccggcttttcatcgacaagtgcaacctgcgtaaaggtctgattggtaaggcagctatccagataggcccttgccagctttcttgccgttttttcggaagcaaatttatcatactgccatgtgtccctgataatgtcaatcaacgccgggcggtctgatttctgatattctctcaatacaatctgtttatccattttgttttctccatttcgtctttctaaaatcgtttgtgggatttcctgatacctttttaatagataatcccgcttctttgtgaaccaccgatattctgtgattaagccgccaaccgcaaacaacacaactgcaatcaaaaggctgtgccggaagcccgcccattcaaggagcaagtagctgatcccggacgagagcagcgcggcggttaagtaaatgcctatcgtgtactgttctacctttcgtggtggcagcgtgataaagaaatcgtcccacctgtcagaattaaagccaagctgttttcctttcagccaaaagagcaggaaaaatacacccaaaccaagccacaagcataagagccattttcccacgattacagctaataaaataatcagtttcaaatctgcttacacctccgatcaatagtgataacgctgcttatgttttaagaacatggcggctgaaagaatgatcgccatgaactccgccacgggtgttgccagccaaattcctgtgacacctaaaagagccggaaggattagcatggcaattaccgtaaacacaaaggtacgggaaaacgccagaaccgccgaaatgatcccgttggagagggcggtaaacattccacttgcaaaaacattaaagcccacaaagagcaacgccagcgaacaaatccgattgccaacaaccgccagatcatagaccggatttccgggccgtgcaaagatggacaccaaaggttccgtaacaattagggaaacaatcacggtgacggctgcaatcgagccgataatctttaagctggtacggatcagctttttcagcttttcatggttttgctccccatagtagaaactaatcatcggggccacaccgtaggtatatccggcgtagagagagccaacaaaggccagcacataagagataatcgtaatggcggcaacgccattttctcctacatatttgagcattgtccagttgaacatcagcgtaacaatgccgttgactaacgcggtagccatttccgaacagccatttgtgacagcctttccaagcactttgaagcggcagacaggcttcacaaaatgaagcagactgtttcttctcgtgaacacgaacaggcccacaatggcggtaatggaataccctaatccggttgcaatcgccgcgccgccgatcccccaatgaaagacggcgataaacagatagtccagcgcgatatttgtcacgccgccagcgacggagcaaatcagggaaagggttgctttccccgccgcaatcatatacagggtaaagttgttcattaacaggatcggcacggtaaacagcagatagcggcttaaatactctttacaatagccggaaacttctgcggatagggacatggcattaaaaatttttcccatgaacaagtaaccaatcccacacatcacaaggccaaccagaacatttaccaaaatcagaaaagtaaagtcctgttttgcctcgtcagtttttccttcgcccatctttttcataatggccgcgcttccgcctgtggcaagcatggtggaaatggctgtcaccagcgcgatcaccgggtacaccagattgattgcggataaagcatttgttccaattaaatttgatacaaatagaccgtcaaccatcgtataaaacgacataaatacactcatagcaatcgtggggacagcaaatttgagaatattttttaaggtgacgggtttgctgtatgcagtttcattctgcacaaaaatcctcctatctccttgcggttatccttgacatagtttataatagaccgtacagtaacaggacggtcaagggggattttgaaaaaatggcgagagataaaagaatactattcaccatcgggcagtttgccgctctgcacgggatcaacaaaaaaacactcatgtggtatgatgaaatcgggttattcaagcccgtaagtatcaatgaagaaaatgggtatcggttttacagttactaccaaagcacggagcttgaaacaatcctgctgctccgggacatgaaagtgcctgtcaaggatattcaggattttatgaaaagccgatccgctggaaatatggcggagcttttgaaagataagattgcagagctggattgtgccatacaggacttgaaggccgtgcgctccaagctgtgcagccgttatatggatatggacgagctgttaaaactggatttatccgaaatcactttgattgagaaagagccgcgctatctggcaaccgtaccgacttcaccggaaaagacggtagaagatgaaattgaactgattatcgcacaaacacaaaaataccaccttccgcgtatgtatcaggcttcttacggctccatgctttcggtgcaaagtctatatgaacggaaatttgaggattattccatgctgtttattgaagtgccgaaccagcaaaacaaaaaggggttgcataagcagccggggggaacctatctgcgggcgttctgtgtgggaaactgggataagctcccggcgcgttatgaagaaatccttgcatacgccgaacagaaccacttgcagctttacgggtatgcctatgaaatcgggatcaatgaaatggtgattgataagatcgaggattatattacgaaaattgaaatcccggttttaagtcgggactaacgagaaaaagccggggcgcggcaatttgaaaaatcactatgctccagccaaaacacacttgggaaagtgtacagtgtgtctgatagagaaggtgccgcttgtttttcatgctctttctcctgtgattttatcaagcgacaaccgattctgtcatagcagtttgcatatctatgtacccagccgcctgtgcggctgggcttcttcttttttggggctgttaataggcaggtgtgctgtatccgtaaatctcatagtatcccacggggtagctgttctggcgcacagcgtcaccggagttgccctccacggtgtagacgcggccattctccaccttctccacaatccccacatggtcggaagaaccgtcctggcctccattatcccaatcgaaaaagatgatgtcgccggggcgtggctcatagctgttgtcctgccacaacccgcgctccttaaaccaggggacgccctgggacgcacaggctgcaaactttggaataacaccagcgtcaatataaccacactcattggcgtaaccagtttcaaatatcttcatctaaaaagagcgcagccattcagactgcgctctgtgaatatttaggaagttgtttgaaagcgatacccaacctcacggacactttctataataaaagggtggtgcggatcagcggaatagagctttttgcgtagattgcggatatggtagcctatggtgcctcgttcatttacggttagagcttcaccccacaccttttcatagatttgggaataggtcaacactcgtccattattaactgtcagcaggcataggagactatattcctttgctgttaggcccacttctttttgattgcagcgtaccagcctttggctggggtcaatttcaagatcggggagagatagcaccggttccgaggaaagctcccactttttcagttctgggtgaagttgtaaaaacgagaggaaatcttcaaaaacctttttttcttcctcgttcaacttcataatgattatttctccgatggtatcacctcccagtcatttatccaaacagcctctttcagtttcttaaaacctattgccatgccgataatgcactgtgtatcggcttatgtttattgcttggattttcttaacatagccgcaatgagaatcaacaatgcacaggctacaaaactacctataatatacgtccatccaaagaatgacaaactgaatatattgggcgctaacggatgagtaaagaaattggtataaggttcgtttgacgcaattctttgcaggacactgctgacattcacaggatctatgccatagagaaatgctcccataagatacagagctattttctctataatgtttggcaaagcaattccccagatgtatatccagatatttgttgtccttgttgacttataaagataaattgttcctataaggtatgggataaaagccaaacaagcgcctaaaagaccagcatataaatggaaaccaaatacgataaatataagtctcagcaaaaaataggtgcctaaaataatcaaccagcttaccgataaagaaagaacgttttttcgtcccttgactgcgtgtgtattagttatttgctgcattattacacctcctaacggatgattttactttcgggaatatcaaagatactgttgtaccgcactttaattctgatgtaatttgtaaatctattgctaagtccgtcgccattttctttaccaaatacaaccccatacctgttgatcggctcatatagctgcctctgtctccggtaaaacctttttcaaaaacaaacggcaggtcggagcttggaataccggggccattgtcggtaattgaaagaacgattgtttcctctccgccattttctctaagttgaaacaacaatgtaggtgacgatgttttatcggcatatttaacactgttattgataagctgttccaaaataaacatcagaccttttttgtcagagagaacgtcgcagtcatctcccaaaaaatcaatcgtaaatcccgcttcctccaacaatgtctgattatcggcagcggattctttacagacagtgagaacggaaagcggttcccaataataatccttatgagttgcccctaatcgggaaaaatagagaatttgttccacatcttgccgtatttggtcgcgtacatggagcatacgagaataaacaaggggagacaattcttctttacgattatctaaaacgagcgtcattaaggaaagcggctttttgatttcatgtacccaattttcgatataactttcatagtctgcaagttgaacgccgctattatcaatctctgcttgtcgggctcttaaattatcacccaattcatgtataaatgggtgcatggatataggggcagcttcacataaagcatattcgttcgcttcatcaggctctataagaaaatggtgaaatacggtttgcagcttgtggtgtcgtttcactaaaataaacagtggaataaaggatgtcccaacggaaacggaaatcatcaaccatataaggctgtaaaattcttccggatatgcaaaccatgcaaaaaagataaaaagtacattggcacaagctaaagcaatcaaccagattttgcatgatgaaatatatgctaatatttcttttagtgttttcatatatccacctgctctttcaaacggtatccctctccgcgtactgtttctatgcagtcatcaagtccatagttccgcagtgttttccgtaaacgagtaaaattgacttgtagggcattttcatctataaatttatcagttccccataacgcatgaaaaagttcttcttttgaaactgtacgaggatagttcattaaaagagttaataaaatttttccctcattaggtggcagcaaatacgaagtttttcccacataaatagtgaacgtgtgaggatcaagtaagaacccattccctttcagcaaatcatgttgtatctgtcgctgttctgtccgccgcagcaaagattttatacgcgccagcagacgttccatattacagggcttagttaaataatcatctgctcccaaacctaatgcatgtatttcatcctgcaatttgtcccgggcggtcaataccagcacacccccgatccctttcgctttcaattccctgcatatatcaaaaccagatttgtaaggaagattaatgtccagcagtatgagatccggcgcaatagcctgaatttgggaaacaacatcctcaaattccgatataggaaatgtatcgtaaccggatttattcaagaggtcaataagctcctcccgcatatataaatcatcttctacaacaacaatttgtgccaatatgaccgcctcctttctttcattttatttcccgtcaagagttgggcttccagtttagttttgcgatttcccggtctgcggttctggcaactgcaacagcatacactgccaatattaaaatgacaattccagccataatacctgccattaaataaaacggagcatcgctcactaccgaaggtgaaaggtatttttgcataacgcaaagcccgacagttccgctaatacaagccagccccagcggtaaaaggaaatagtacagcacttgtctgtgcattgactttttcatttgtttacgtcttgcccccaaaagcgaaagcgtgagataccttgcctttgttgcctgcatttgcgtcaaaaattgtaatgcgagtaatgcacaagcaataatcaaaagcataaagcccatatacagggtagtataactaccggacacgatataaaagagctgccgcccgaaattatttaagtaactttcaaagactaaaccggatggccgcagaatatcgtttacttccataatcgacaccattaaaccatttgcttcaactcgatctttcggaatacaaaaattccatgataccgtaatgctatctgggtttatatagctttcaaatacatcatcggatacaatgagcgcagtaaagatgcgaatatttctatccgcagtcaatcctttcatcggcacagagggaaccaaagtaaattcctgcccatcgacatcaatgagtggcttttcttgtgaggcacctatgatttggttcaacaatttttccgcctcggcttgcgcatcctcaaagaagtctggattgagatacaaaatggcctcgttatcgtttaatgttaaagtatcttcccctgaagcctccaaaagctgattataagacgaaacccgcagcaggtaaggcgcagatccgcttgtatcaattaacgctaatagattaagggccgccggattattagcgccgatctcataactgacagctccttgtgtggccggatcttccacgttacttggcagagcatgaacaatttccctgcgaagcagtgaccagtccatataagagcttagcccgccgtccggctgtttcataatccctgtttccatacggtttacatgagaaacataaggggccattttttcagatgttaaatattgctccactgtctgatcttcaccagatattgtaaagtcataaacagatgccccgcgtgtcagttggtcgctggatgccataatacgaacagagccatccgcaatcaacataatagccaacatcatcaaaagagaagcaacagaaacggatacaaatttatttactatattttcctgcaactgccgtaaagtgaaagtataaagcccttgtgtagatttctttttattagagcctgccaacaagctcaatagtcttgccagtccgcgtataaagaatatcgtccccataatacccaggagaaccgctaaaaataacatggcccctcctgcggccatgaaatggtttaatacaagccaatatgcaaaaagcaaaagtgccgttccaagaataagagtgacgatactgccgccagtttttcctattttatgcttttttgctatttcgccataaagaagctgatggatttcctggcggcataaccggccacccaaaataaacagcgcgattgcctgaacaagcataaatcccaataccgtccagacaacagcactcacagaaaagctggactggtgagaaatgatatcttgacctactaatctggatgtcgcaaggctgataagctctgacagaaatccgccgcaaacaatcccgccgcaaagagctaagatagaagtaaaaagcccttccatcaagagttggagaaagagccgccgccttttcattccaaagagcagataaagccccagttctttactacgacactcaagttgatatttgtttgcaaaagtcacaagaaaaaatacaaataatagtgcgcacagatataccgcaggtaacattgtcgtaagcaaacgattgacagcatcactctcaatttctgccagaaaccgtattacatcttgtttttccaaagacagcatgatatagaaagctgcaacagcagttatcattgtaagaaaatatatcagattttcgctgcggtttctcttggcatttctccatgcaatattaaagaacatttgcacttcctccccccatttgcgccattacttgcaggatacgttcatagaacgcttcctgcgtttccgtttggatttgtttcctgatttcgtggaatattacaccgtcttgtataaacaaaattctggtgcaaaagctggcagcgttggggtcatgcgtcaccattaaaattgtccgctgctgtttttgattgatttcctgcaatttttccatgagctgacgcgccgatttggtatctaaagcccccgtaggctcatcagccaaaacaatagagggatcggagatcaggcagcgggccgcggcgacacgctgtttttggccgccagacatctgggatggaaacttgtcaaggacattcctgattccaagaaaatctgcaagttcaaataattttttttcggcagtagacgcagctacgttatgaatggataaaggcagaagaatattttcttttcccgtaagattatccagcaaggcaaaatcctgaaaaagatatcctattttagtgccacggtattctgccaaatcatttccgctaaatgaactaatattttcaccggaaagcatgatctgaccggaagttggttttatgatcgttgcaatgcaatttagcagcgttgtctttcccgaaccactggcccccatgattcccaaatattcaccggggaaaacgtcaaaagtaatgccattcaaagcctcggtcggtacgccgtctttgttataaaacttgtgaagattgcgtacttccaataatttttctgtattcatagtaagacacctcaaatcttttttgccaccgccattggttacaaatttattatacataaccgaggtgagcattactacttacattgtctgtaaggttaagattttgctgtttgtaaccggaaactccatgttcatattatatgtgaaccatactgtgaaaaaaagtgtgcgaatttgaatttcgcacttccttttatgtacccagccgcctgcgcggctgggcttcttcttttttggggctgttaataggcaggtgtgccatacccgtaaatctcatagtatcccacggggtagctgttctgtcgcacagagtcgccagagttgccctccacggtgtagacgcggccattctccaccttctccacaatccccacatggtcggaagaaccgtcctggcctccatcatcccagtcgaaaaagatgatgtcaccggggcgcggctcgtagctgttgtcctgccacagcccgcgctccttaaaccaggggacaccctgggacgcacaggctgcaaactttggaataacaccggcgtcaatatagccgcactcgttggcgcaccagctcacaaagcaggcgcaccattccacacggctgtcaaagccgtaccagctccaatagggcgcaccgcctgtgttccccacctgtgagagcgccacggtgacgatctcgctgtcgcctccggtaatgccgtaaagcacctggctccagagggaattgttctcatcggccagaagctccgccatctgttcccgctgatcttcatgaaagctgaactgatcggccatttcctccgccgtcttgtggctaacggtgatatacagataggtgcgggtgacggtgacctccgtttctacgatgttcccgttcccatcgtctgaggtttcaatgatggtttccgtctgggtagaagtgctggatgagatttcattcatctgccagaaaatatcctttaagagctgctttttggaatcgtccatggtggccacttcctgggcagcgtccgggtcggtggtggttttaacagcatacaccgcaagcacctctttccaaaccgcccggctgccggacatctccagcacgtcgtaggtgtgggaagttttgatttcctccagcttttcctcgtactcggcgttgatctcctgcaccgcagtctgcatggtctgcccggtgccggagtcctccccagaaaagaaaatcccaaagcaggagccgacaatcatgccaatgaggcagatcacaataatcaccagcaccgcaacccagccgcccgcagcgatggccgcaatcagcgccttcgttgctgctatgatggctttcactgctgcgatggtggccttgaccgccacctttgccgcagtcacagccgcttttgccgcagcgcgggcagcatgggcggcggctctggcggcccttgccgtggcctgggctgttttttgagccgtttttgctacttgctgggtagtcttgatactggctttggctgtcttttccgctgttttaatggatttgctggcggttttcactgtccctttggcggtagaggacgcctgcttgatggtcttacggctcctgtccacggttttaatgcttttctggccccgaaccagagtcttgacagccccgcgctcctgccggatggctttcaccggctccgaaatacggtctgcggcctgtctggtctgccttgccgcctgcctctccgcttgttttttcggctgttcggctgcggccttgcgcttctggatgttctccttgaccttggaaatgttctctttggtggtcttaacccctttgcggccctgcttgtcaaattggtggacagcttcacgggccgtattctcacccccggaagaaacacggtcggacgcatactcgccgggggagccttcctctgcgtacaggccatgctcggccttgtccttggtgcggatatatgcttccttcatccgctctgaagcaaccgcagatttatcaatcgccttgatcgtcttttctgcaacactccttgtctttatatccggcaatccttttcacctccaatccctcctgggccaatctttgctttaaggctgcaaagaacgccttgccgcgcagcttcccgccgtttgcctgccaggctttttcaaattcaaagcggatggcaagcgcacggacagagtaatccgcccggaactgcctccatgtgctgctatcccattgttcaagctgccgccataggtgcgggaaatgctcatacagtttccgtagctcggacaggctttgcaaggggcagcaccagcaggaaacatggctgaaaatatcatacaggccgccccaatcaaacccccgcttgtaacagtaggcaagacagtctttttctgtcattgcccactccacaagcgggtactgcttatccttgattcgtttttcttcatcggctgcaattccgatatattcccatacatgaaaatgctgtttcagctctttcagatatgcttgaatgatccgggttttgagcatggccgtacaccaacggtttttcggtcccggccagctcatgccgtcgtactgctccaacgcgggatttttccgctttggatggtagcggtaaaaatagtattcaaaatcatgggcagcccgcagcttcacaatgggtaggccaatatattcttccaaccgccgcaaatggtcgtacatctctggaaactccaaccctgtatcgcaatacaaaatcagatcaaccggatagttttcttccaaaagccgcagcagcatggcggtggaatctttcccaccggaaagggaaacgatgtgcttttcatccttcatccataccagcctcctgtgctggtgcgctgctctgctttgccaccacaaccatcctgccgtttgtgcgggaatattcacaggtggagagggtgatgagcttgtcgccatattccgcagtcacgcccgtatcataaagggccagcgccttgcactcggcaatatacgcctcaaaagcctcggcgttttcagcctggacaaagtggtaatacttgaacccctccccggagtaggccaccgtcttaaaggcggcgatcacctcatactcgccaaagctgtccagcgtgtcaaaatggatggtcttgtgttcccggtagaaatcctcgctttcatacctgcacaggtcggaaaacatcgagccgttgttcatgtggtggccgtacagcaccaggttgtcggaaatgccaatgtcgcagttttcggccagatagggcacgccgtagctgctgtacgatttgtcaaaggcgtgcttgaggtaaaaatccgggctgtccttggtctgcatgacagggtaatcaatccgggtgccggggatggaaacccagcccaccagatcgctgttctgggcgtacacgtccgcgtatttttcaaaagctgtgagtgcctccggctcctgggccgggctgccttccaccgtcaaagtgggcagctccacatcttccttgaccaacccagccacctcgtcaaaggcttcggcgctctgcttttggtcgagatattcacgggccagcatggccccggagaaaaggaaaagggcggcacaaaaggccgcccctgcaatcatccatctggttttcactttatcactcattttctttaccctccttaccgcacctgctctttgctggctgcctgccggtgcggtgcgtccggggccgctttcagttcccgcagctccgattttacggatgatttctcaccgcctgctttttcagccagacgggccgcgccgcgctccatcccggaaaaggtcttgccgcaggacagaaacaggccccgcagcctggcaagcacgcccttgtcggcctccagctcctgggcctgctgtacttctttgcctgcaagggcgcgcccggcgcttttcatgtggcttcccgcctggtgcagctcctcccggaacacatccagctttccggcgcactgctccatcgccttgccggcatgagaaaagccgtgttccatgcgtgagagaacggcggggatacgcaaagcctgcaccgcatggcgcagggcagcgcgccccttttcctgaaaggtctgcaccatgcgcccggcagaggaaatgaggtttgccttggcggtggaaaccatcgcttttacctgctggattttgccctccgccgccgttgcaagctggacgcatttggcctggattcccttgtcatggagcttgccaacctccaggcggatttctttcatttcctccatcatctgggccagcttatcctccatgccgtcgatataccccaccagggcctgcacttcttccttttgcttttgaaggttgtttttctccagcacggagagaagctcgatgatctggggatgttcccccagcgtataggtcaattcagccattttattttcctcctatcaaggccattatcgcgccggttccgcctgctttctggcagggggcagctcacggcagtattccggataacggattttcataccctccatgaaatagggggcaaattcacagcagaacagatcctccggggaataggcgttgctgtgttccggctcggtatagccgttccagaggttgaaggccaaacggcacacccggacggtgccgctggtctgccagcctccgtgcataccctccggtttgatacagtcccgcttgaaatcaaacatctggcggatgttggcccgtgtttccggggcaatccccatgacataaaagaaagactggtgatagcagtcgtttttccgtgcctcactcatcatccgcaaaaagaaatcccggtgttctgcggacgtaaaccggatattgagcctgctcataccaaaacctcctcgccgccgaacacgccctcaccgggcttggtggtcatcagggcatacagctttgtgtcccgcgggaagcggttgacgaagggcaccagggcgctgccgtagcggatgaggccgcagcccgcgtccgcgttggtgacatagctcatctgctccttagagatattgaggagcttggagagcttttcccggtcggaagccgcctggttgagcatgacgataaattccgagttactgagcatggtgctggcctggacggaatccaaaaggtactccacgttctgggtaatggccgtaggataagcgccgcgctttctgaactgccgccatgcgctgttaaagaaaataccgctctgctcgttttcaaacatcacatggaactcatcagtaaaaacatgggtgcgcttgccccgtttccagttgagggtcacgcggttcaagatggtgtcggtgatgacgagggaaccggctggctttagctgctcgcccaggccgtggatgtcgaacaccacatagggcttattcaaatccaccgtgctgtcgcggccaaagatgtccagggagccggtggtgtaaagctccagggaaagggcgatctcctttgccttttcctccggctgctccagcagcttgttccgcaggtcgcagagagtggcggcccggccctctttttccgcctccgggtaaacaagggcggtgcagcggtcgatgatggatttatgctgcggccccacgccgcgcttgtcgatctgctcgatgagggacataacaaactgcgacttctccacaatgggattctgctcgccgtaaccctccaccatatacatggaattgagcttgtcttttccgcctgccaccaggtgggccaccgtagccttttcgcggcccagggctttcaccagtgcgccaaactcgccctccgggtcacaaatgaggatttcatcattggcgtaattgggatggagcataaggaaggcgatcagctctttcaccgcaaaagattttcccgcgccgggaacgcccaggtaaaaagccgactggtttaacaggttcgccttgttgcacatgatgaggttgtgggaaatagcgttctccccaaagtaaatgccgcccttgtcctggatctcctgcaccttaaaggggatgaacaccgccaaactctcggtggtgagggtacggaaggcgttgattttgcgcaccccaatgggcagggccgtgttcagcccgtcaagctgctggaacttgagaaccgcaagctggcacatatgctttcttgccacggaaagcaccgcctcggtgtcactgtcaagctgctccttggtgtcggcggtgatcgccagggtaatcaccgcaaacatcatgcgctggtcacgggtggtgagatcgtccaggaactccttgctctctttgcgctgaagctccatgtcatagggcaccacggcggaaaagttgttattggcattttggcgtctttgccagttggtgatgttcgtttccacgcccaataagcggttttctacctcccgcacagcctcatccgtaggcaccggaaccacgtcaatggagaacatcagattgcggttgaaatccgtaagctccgtcaccatgttgtccttgatatagctggcaaaatccttgaggaacaacacccggcaaaacttgtcacccagcttcacatagtcgctgttcttctccatgctgtcggggcagatatagtccttgaaatcgtggccgcgctttgccatagccgccaaatcaaaggagaactctgcctcctcgccctggcggtagaaatcgtgcaggatacgcagcctttcggaagcgtccagctccacgcacttggaacccagggcggcaaagtgagaaatgaggtcggcccccacgcgggaaaagtaggcgcgggcctcctcaatatctttcttcaccacagagatggtgatatatttctcctgggtgattccattggccccggtggccttatcgagcagcatttgattgtattccctgcggtactcgtcccggaagtcctcctgcataggcatgaggatggagttttcaaagtttgccttattcgtcctccggttgttgatggtgattttcgtcaccgctccagaatccagggagttgagaagctccgagtagatgaggaacatactctctttatcctcgcggcttgccaccagataattgatgtcgctgaactgataggttttggaaaacttgtttccggtcaaaaaaatgccgtcctgccagatacggcggacggggatcacatcctgcaccttccggggtacggtatatcgctccttgtcctgcttggacatggttttcaacgttttaatcatgggttgcctccttccgcttgtaaaactgtttcggctctttgggctgctttctgacgggccgcccggtctgccgcccctcgatcacatctttcaaagcagcatagtaatagttgccgtcctcaaactttatctcctttggctccagcatttccgagcgcagccacgcccagatgaattgttccgccgtcatgccgtggtaggtgataaaccccagcatggcaaagggggacgcgcccaaaatgcaaacccaggaaagggtttccacgccaaagtaggggcgcaggagaaagtaaaggcccacggccacgccgcaggccagaatggaaaaaatgaattgccgcatactcaaaccgaaaaacatggattcggtgtagttgcggatttcgcggttgatcttgacttccaaaatgccacctcccgttatcgctcaaactcttttttctgcttgccctgcgcccctctgacagcctgccggtcatagagcttcatcacatccatgccgtcatagtccgccagacgggccagttgcaccctggtaacgccgtgctgcttgcagtagtgcaaatagctctgcatacctgcctggtgttcgatcccgccctgtaaatcttcgatttcataccaggcgcaggcatgggcctccggcgacatacaagccagggaatatccttgctccaaaggctcaaacaggtcggaatcgtaagtgaagcactcgccgtaatgcgcaaaaggctggtcgttttcccgcagcggatggaaccgcaccatatcgtcctcaaaggacgcataggctatcacgtcctccggggaagccttgcttcccttgaccagcagatagtcgattttgtagttttcctcatccggcacgtccagcccccggttccattgatagggttcggtgcgctttagggcgcgcccggcaagcctcatcagcttttctttgctcatgttcaaaacatatccctccgtttcttaacgctcccggcccttttgccgggaagatttctaaaacagccgagaggcagcttctttctgttcctccagccgcgccattttccattcctccctcaacgtctttgtgctttcgggctgtttttcgccggggagaagataggttttcccgttccgctcggcagcgtgggtgggatagcccatgactttcagcgccttctgcacctccaggacgtgttccggcttgggctggcaaacgcccagattgcggtagatctgaaactcgccgtaccacggctcattctgaaagttgtcggcgcggaagaacacatcctcccggatgtcctcaagaggcgtttccagcaccttgcggcaaacctcgtttcttgtatcgtccattgacttttcctcctttacaggcccatcatctcgcgcaccacgcggtcggccatcttcaccgcgcctacaagcaccagcatattgaacagcagctcgcccacatagctccacacctgggtaactgccgccgcgttggggtcaaccgcagggggtgaagccgcgaacagggagaagataatgcaggccagcacgatgattgccccctccaggcacacggcggcatagcttttgatgaagctcttgcccacgttctggctgggttccccgccaaaggtggacagaggcaccggcgcgatggccgtgtatagtagggtaagcgcccggcgccttgccgcattgctgcggtaggtttccaaacgctcccctccaaaccggacgtacacctctcgatgtatccggctttccagatatcagtctaactttccattgtgcagctttacatggcaggagtggcacagcgccattgtcttgcgtttacgcgcaatcatttggcgttcccattctgccttaccacttaaatctttcagttttcggacatgatggatttcaatattctctgtttcggctccgcagaactcgcagatatggccttgcaaccggtctgtcagccgggtatagcggcggttctcgttagccctgccaataatgtccgggttttccgttacaacgactttgtcgttatggcgcataccctgattgtaaaacaccacggattttgtcccgtttttcgttgaatacgatacggtaaaatccccgttgcggcagtatttgcgaataattttccgcatgctcgtccgatattttccggcgaaggtcttgtacatgctgaacttcatcacatagaggaaggcgttcaacaccgttgcattgtttgccagccgaaaatagttgtacatgccccgcacttctgcattgtactggttcagaatctcaatatcatccaggcgtatcaaccccggacgccgtaccggttcccatacctctttgttcccatgggttttgtcatagctgattttcagcgcgccataggagagaaggcggttcagccatttctctttgggcacatacagcttgacttttcctacataggttcggcgtgtaaaacccgtttttgtccgggtactgttttgttcccggctgactgtaatcagatatccgaggaagtgggcaaagtcacttccgtgggtaatgagcgttttttccggggacatctccaagtgaagatgttccttgatgaacgctcccacatcggatttgacctgcctcgcatcctctttactcccaattacaccaatcaggaaatcatcagcgtaacggacataaacaacccgtctgtattccgtatccatggggtcgctgtaagggatagagcgcagttggctattaagttcctgtatctgcgccatgacctcccggcgtttttcctcactgatttttgcttcattgcgtttcagccattcctgttttccgcgccggacatccaacggctttttgtaggccgggttgattttccgttttgtaccgcggttaaaggatttggaatactccgccatgaacacatccagttcattgaggtagatattcgccagaattgggctaatcagcgacccttgcggggtgccggaataggtgttgtagtacacccaattttccatatatcctgctttcaggaatttccaaatcaggccgataaaatgctcatccgcaatgcgcctgcgcagtatctgtaccagcacatgatggtcaacgttgtcaaaacatcctttgatatcaccctcaacaaaccatttgacccccgtgtaattccgcttgatatgttgcagggctgtatgacagctccgctttgggcggaatccatgggaagtaacgtgaaaggtgggttcataaatgctttccagtatcatgcgcaccacctcttgcaccagcttgtcgtcaaaagacgggataccaagagggcgtgttttgccgtttgcttttgggatatacgttcttctggcaggttttggctgataactgaactccttcagtttttgaatgagggcttcaattcgcttcatactcatgccatcgattgttttcccatcgcttccggctgtcatgttgccgggttttgcttggatacgctcatacgccagcagaaaaaatgcaggattgtacaagtttcgatagagcctttgatagtggtaatctttgtttgctgcttttgatgtcagactttccaaaacgttctttggacttctcatagtgcctcacgcacctttccattgatagtttggttgatatcctgccgcccttcgccatgtgcaaggctttcccttgctcagactactacggcggctccgttgccataccgaattttcaggctctgaaagccatagcctataagggcgttccgggttaggcaatccccggttaggcagtttgggacagcgtgttgtgatgtcggaatgggttttcgtccgttatccgcttactgcggttggctgccgtgggtatttcgcaatcggcgtgtacctgtcaccggttgccacggcatgcggcgaatacaactatcctgcgccgccggctcaagtatgccgccttggactgcccttcaagcaatccagctttattcctcattcacaacgtttcaccttgccgttcagtagtggttcgatagtttcccaacttacgacgttgccgatatgctacactccccattgggtttccccgccggataaatcggttggtgatagggtaatttgcacctcccttcggaataccttctcctactgccgcgctactggcagaatcccaaattgcccgcgagctgctttggcttatgccgcagcccttccgggcgcacaatagagcttaaaaaaccgcccgtagacggtcataatcataatgaagctgagaaccgtgatgaacagcccgccgatgagcgtcaccgcccacaaagggatactctcaaaaaatccgcagctttccaccgccgtgacgatctcctggggaagaaccgtctgctgcgcagctccaaagcccgccgcgttcataatggtggagacaaggccctggacgatattaaagagggccatcatcagctccagcccataggtcacgacgcccttggcaatggcaaaccggatgaacagctttaaggcgtgttccggcttcttcacttctgcgaagctgccgcaggttttcacgatcccgatgacaaagaacagcaccagaagcgccaggccgatggcccgcaccgcgtcgtggatgttgacgatcacgctccagatcgtgccgcccttaaactgttccgggctttgggtgatgagctgccagatttcagacaggtacttgttccaggtgtcgagggcgttttgcaggttttgcacaacccagttatcggacattcaaagacctcctttccggcagaaacaggggcaggacaccattgacctgcccccatgccgccgtttttcatcagccggtaatcagggtcaaaatctccttggcaaaggtaatcacaacgccgcctgccaaagtgaggaagccgttggccctctggctggggtcgtgggatttgagggacaggccgatctgcaccacgccgaagcccagcaggatcataccgatggcccggatgaggccgaagatgaagtcgctgaggttgttgatgaccgtcaaagggtcgctggcggcaaaggccgtggtggtgcagcagcacagcataagcaccagggccgagtaggccgtgagggcgcttttgctctttttgcccatgggcaggctgcgggtttccttgttcttgttctccttgttaaacagtctcattttgcttttcctccttgaattgaaagattttctccatgtcctcgtcggacagaagctcgcaggtcacatccggttccttgagattggcaaggtcgccgggggtaaggcggctgatggtcaagcccgccacggcgttttccgtgccgccgtgggtataggccggtgcgccgccatcggtggtgtatttcacgttggggtgctttagcaattcgtacttttcatccatcagcggcggttccccacggataaagagcagggccaggcggttgtccagcatacgcacctcgtccggggtcaaaagctcccggcccgtgatctggttgttggtggagtagctgccggaatggccggtgcttttcccgtaggtgtccagccagagggtgcttttgcccagatagctttccgagatgagcttgtgggtggacgattcgttgccgcccaggtacagaaattcatcgcagttgcccatgatggattcccattgcttctcgtacagcgccttgagctgggcgatgttctggatgatgatggaaaccgagatgtttcgtgagcgcatggtggccagcagcttgtcaaaatcatcgggcaggctgacgttggcgaactcgtccatcaaaaaatgcaccggcacgggcaggctcccgccatgtacccggtcggcggaataaaacaattcctggaaggtgctggcatacaaaaggctcactaaaaaattgaagctggcgtcgttgtccgggatgagggcaaacagcgccaccttcttttcccccaggctggccagctccagctcgtcggtagccgtaagggccgccacggatgaaaggttgaacttctccagccgtgaggcaagcgtgatctggatggattttaaggtcttggcgctgccggagcggtagtccttgtaatacttcaccgcgatgtggtcgggggaacgcatttccagccgttcaaacagctcgtccagcggggattgatagctgtcgtcgtcctcccgcacttcaccggcccgcagcatttccatgaccatcgggaaatttttctcgtcctccggggcctcgtagtggagataaaacaccagtgccatgagaagcatggaagccgccgtatcccagaaggggtcgtttgactggctccctttgggggtggtggctttgaacaggttcgtcaccatcttctgcacatcgttgtcgtttttcagataggcaaaggggttgtagcagtggcttttgttcatgttcaaaaggtcaaccaccttgatctcatagccctgccgttccagcaggccgccgcagtcccgcagcagctcgcctttgcagtccaggatgaaaaaagaggtgttggcctggcagatattgacctttgcgtaaaagcggctttttcccgcgccgctgccgccgcagaccagggtgtttaacgtcctgcggtgctttttcccgtccagccccatgcggacgtgctgggtaaaaatgcggttttgaaacgggttcttatcccggtatttccggttcacggcccgcggatcgccccatttggcggagccgtgttcctcgcccctgcggtagttgcgcctggatgagaggtaaatgccaatgcccaggccataggcggcaataaaaatgaggacagcttttgcactgtcctcacaccatacgatttgaaatggatggttcatcgccgcaggcagggcctccaggatttcggaaagccccccggaaagagaaggcgcaatgagcagggcaagccagaccgccgggatcagccccagggcatagagccaggggccgcccgttttgttatcgggcttcatcccgccgcttcgctttcctgtctttttgggatggggcgtcaatggttttgagaagcacgtcctccaccgggccggggtcgcgctgctcctccagcagatcgtttcgcagttcgttgagggcgcggatcataatgccatgctcgtatctgtccagcgtgaggacaaccttttcctgtcgttccattcattcagcctcctttaccgttcctgttctttttgcctgcccgcgcgtgagaggcccatggcccttgccatgcgcccgttgatctccttaaacgtgtcgcgcatatcggtgagggctgccgggatttcctccttggggtcttgcccctgaaacacgctgtccagccgggagatgttgtagcctcccgcttccacgccgtacctctggcagagcatatagctgacggcataggctttgtagccctcggtttcgcgggaatactctgggttgctgcgggcaagctgggcattggcaagctccagagagacgcagcggaagatgtccggcgcgtccatgccctttttcaccaggatggcgttctgttccgggtcgtacatggccccgcgcccctgggcgggcagctcctccaccgcgcggatgggcacgggggaattgctgatgagggcctttaagagcaggcggtcgtcgtagctcacctggggctgggcctcgtcccgcgccgtggtctgggaaatgtcaaagacctccttggcatagaagttctggcccacgctgccgtcctcgcggcggtacgccttgcccggctctaaaatgatgatgggcaggcgcttttcctcctccagaatctcaacgccctgggaagcccactccttgtagccgcccacacgtttagcgttggggcattgctcaccgatgaggatggcgttgcgggcggagtggaaggggaagcggctctgggtgtccagatatgccttcatatcgccgcgcccttcggaaaacgcaccgaataccctgtccagtgtggcgtaggcttccttgcgctgcttttcctcgcggatctgccaccactgttttttcggcttctccttttgcggctccggcttctcggtggcctccggctggggctgctgttcaaacagatcgtcaaagttattcataaccgattacctctctttcgattttggtttcttcttgggcttgggcggctggtgccgcgtggttttctgggccgccttcttttggggtgcagccggttcctccctctttgcagcctccgcctctttcttccgctgggcctggatgtcacgaagctcctgacggacagacggcttctgcggctcatcagaagtaccccttgcggacttgctgctgttctctgagataggcgcggacggatgggatttttcctccgctggggtaaaagggacgcttttctccgcagaagggttttccggctggcttttctctttttgggccggtttttccatcagttcgtctaagagcctgtcgtcctcgctcttttccggggcggctttttccggggcctgcggctcgccgccgcgctcctcgcgggatttttcgatgtcctccttgatggacgccgtatccaccaccgtgaggttgaacttatccacgatccggttggccctcgccgcgtcgtcctcgaacaccaggatgtcgatggtatcgtcccccttcctcaccgggatgggggcatacaaaatgccgtagcccttggcctgcctggcaaactccgggcagtcctcttttttgagggtgtaaacctttaagggccgcttttcccgcagcatggcctcaatgcgggccttgccttttgttttcttctggtctttcaaaatggtataaagggctgcggccagatttttagcggcaacgccggtgatcttaagggcaacctccgcgccctcaaggctcatgcgcaccacctgctccgccgcgtcgcctgcgtgattcataaccgatcatctcctttccagccgtttcctccggccttgttcctcgcgggttttctctgtttttccagcctgctgttcctcgcgggcagcccgtatcttttctttgagggagagggagcgcgccgcaatgtcctcacacagcttcacctcccggcgcagggctttgatctgcgcagaaagggcggaaacctccgcccggatttgttcctgccgggcagggtcggcaagcgcctccttggtgcgcagcttccggtacaggtttttccgctgttcggtcaggctgacaagccgggcttccacatccgattggtaggcgctgagttgctccagggtgtcaacgcgctggcgggaaagcagccttgcctcgtccgtcaattcctctgcccggatcaagtcattccgcagcgcgtggggcacatggccccgctgccggttctgcttttgggggaatacccctaaaaggtagcagtagtggaagtagagggcgcgaaagcccgtgaccttcctggcctgcttcaagtcccccaaaagcctgcaccgcctcggctccggcgtttccaccctctgagggcggcgctgggccagaatccgtttgcggatgttctccagagagtagtcctcgcctaaattgcgcaccaatttcctgccatggggccggtcgtaagggcgcaccgtgatgtctttccccaccttgatgtcgtagcccatctgccgcaggcggtaaaaaaactgcctctccgtcatcgactggcggatggcagcgtctacatcggctttgatgagggagagataagtggggcggccctcctgctcggcccgccattccccgtagtgtttggattttccacgctttggattttcaatgacagaaagcccatactcccggcacagccggtcagattccctctgcatgtcgaagtaatccttttccgtgcggtggtatttgatcccgtcgagaaacgaaaccgtgttcaccacaaaatggttgtgcaggtggtgggccttgtctaaatgggtggcaaccagcacctggtatttctcgccccacaatgcctttgccagcttcagcccgatctcgtgggccatttccggggtggcctcgccgggggcaaagctctggtagccgtggtaggctacggtgccttcctccttgccgaaccgctttttgacggcgatcatctcatcgcgggcggtggtggggctgcaattcaccccggacacaaaccgctgcatgacgggcacatcctcatcgtccaccgcaatctttcccgttttcttctgctggacggcgtactcaatcacatcggagaggccctgggcctccttgccgtccatgccctgtttctcgtaggcggcagggttttcggtcttatccgggttttcgatatagatgagaaccttgcccagccagccgttcacccgccagatagatgtggtagccattgctttactccataggctttggcaaaatcatcgccctggtgatgtcccggatgagctggtcaaacttccgtatttcttcctcgtagcggcgctcgtctatgacgcccagcacatgggctttctgggcgatctggtttaagttgtttccaatgccgtgcagctcccgcataaaatcaaagtatgccgggggcggcgcgtcctggggaaccaggccgtttatcaggtggcgcaggtacacctcgcgggaaagcccgctgcgcttcacctttttgttgaaggcttccgcctcttttttgtccagccaaaactggacgtgtacgttgcgttttctcattcctccgaatcctccttcctgcctaagcggttgatttgaagcaggcacataatcagcacgccgaacacgccgcccagcagaaacccaatggcaaaaaacaatccttccatagaaaacctccgttctgataaaggggtattagggggcgttccccctaacaagctgcctttgtggtatcacaaaggcgatgcttgctggtacatatacattccattccccgcaggggaataccgaacgcccgaaaaaacaattcatcgttcgccccggtcgcggctgcggcctctggggtagaactccacatccctgaagctgtctgcgtccaggatatattcgccgtttttccatcgctcttccaccatccggcggtcctcctcgcggctcgctgcctccaccgtgaccgtcatttccatcgtctctcgaattgcaatgtcatactcgttcattggcctgcactcctttctgattctaaacttgggcaacaaaaaagagcgccctttttcagaacgctctccaatcggatgttttaatttcatcttgccttttcctgtttttgacggcggcgggtggggatggcaaggagcttccgcactcggccctccaggtgcttctcaatggcctgcaagtgttcctccggcagattgaggctttcatgccgtttgaaccggaagccgatcatccgccgaagctgctctttctgtctggcccccatgacctccgcgcacacctcctcataggagatgttgtaggggttggaacgggttttcgcatactcgtccagatgggcatagtcctcttttcccgcatagcagaacaaggaaagcccgttgtcaaagacaggggccggggcgataatcttcccactgtggttgtcacgcagaacgccgaagttgccaaagtgccgatcctcgttgtagatcagcgcgtcgaacaccagcatactgcaaagctgctcggaaaactccgtccccagcttctcgtaccaggcaaggcaggcagctattcctccggtgcgcacaatccgcccaatggggatatatgccgtgtcgatgttcgtaaacagctcacacttcgaggccgtaatgcctttccagttctccagatcgtagtggacggcgtttaaccccatggtttccgcaacctgcgacgcatagtattcgcagtagggttcccggcctgcgttggacgcgccggtggtgccgcctttataaagataaatcccgtcctgctccacatagcgccacgctttgggcagcataccgcctgtggtaagctccggggaagtggtaaatgcctgacggcttccgcccgcgccggtgtaggccaccagggccagaatctcggaaaagcggttttcataaaggttgtattgggaaaacttcccctcaaacccctccggcaccacccaatagctgtcgttcaaagacagccccttgcaaacgtcaatgatccccttggtatcgttatggctgaggcccagggttttcagaatctcatccacaaaggcgcggtttttgggaatcacccgccgctccagccagtgaataacgccctcgccggtgcgctccatatccaggggcagtaagtgggtctgttcctcattggtataaaggatttcggccaccaggccggacaatccctgcttctccattgaaaagcgcataagctccgtgtcgtagatacgcagactgtaaatgttgctcataggttcctccttgtcgtccaaaagaagggaaacgtctttccccagcgcggacgcaatcttcaaaatcatatccagcgtgggattctgcacaccgctttccaggcggcagatattggagcgctgggttcccacacgccttgcaagctccgcctgagaaacgccctgttccagccgggcctctacaagctgggcaataattttttgccgtccatgcagttcatccatgttctcacctcgtctataatgttatcataaaagataacattatgcaaggcgaatgacaatatcacctttcgctcatcgttcttgctcctttcctttcgcgccccggataggaatacccagccttcggcacaggtagtcgttcacatcctttcccctgggcggcgggcagtttttgacctcgtattctttggagatcactgtctggatggcttcggcggccatcctgccggggccgtcgttgtccagatggagatagacggttttcacatgaggataatcctctaaaaaacgggtgagggccacaggcagcttgctctccgcaatctttttcttcggctgatataccccggccaaagacagcaggttgtgctgtttccagtcgattccgtccagcctgcaaaggctggcataggacatgacatcaatggcacactcacacagatggacagccggatttttcccgcaggcgggcagggcaaaggaatagtgcttgtcgctgccgcttaaatccccgtggaaccggccctcgctgatccctcgcaggcagccaaaccgcgcttttccggttttgtcaaagccgacgaacaccacatttccatggcccttattccggctctcataaatgcgcccggtctggacgcagaagtccagcacctccatggaaatcccacggcctttgaggtagtccagcatagcctggttgtttggggcgggcggcggcaaaagcaggtgcttcggtttttcttcccttggaacggacgtaaaggacggcggcggggcggcagccctgccggcaacggcctccattgcctccatgaaagaacagcccttgactttgatgaggtagtccagcgcgctgtaaccgccgatcccacgggaaaaccagcaccatttgccattggaaatacgcaggctgtcgtgttccctggtgcagtagacattgccggaaacatggacaagctcctgcggctcacaggcttgtagataggtgaacaagtccacctcccgcgctttttcgatctcctcctggttgtaaaaaggcataaaaaaatacagcccccttcccatagccacaaattagctgcccgcatggggcaaccggctatgtaaagggggctgtattcttcggatatgtaaaaggccgactggactattccaatcggccccgtgaaagcgtacaattatttatttcatcgccatgatacaaagccgatgctttgtttcgtcatggtcaacgataatctttgaaaagccagcgtctttcaaaaaattagaaagctgtgctttatcaaaaatctgcaagccctctatgacatccagccacttttcatcacttctatttgtaccgtcagattcatttacaatcaaaaacaagccattcggttttaatactcgacagacttcccggaaactttctgtaggccccggccaaaaatagacggtttcaaaggctgtggccagatcaaaactattttctgaaaaaggcagtgtagcgacatctccctgcaatacctggcacctcttatgttggatttcccgccgattgacctgttttgttttttctacggacacctcagaataatccaacgcggtcaacgtcgcctttggaaaattattaagaagctgggccgcattgcgtccgccaccgcagcctaattctatgatcgtctggggctggatagaagataaatgccttatgccccagtcggacacccccgcatgagctttattcattccgcttaccatcatctttcctaatatcccgtccggcttccgggtattactaaaatatttttttatcagtcccattttccttacctctgaaatgaattagttgtagctaaccgcttttattatacagcacttttttgaaaaagtccatcttggtatgtaaaaggccgactggattgctccaatcggcacaggggaatcaacgctccaatcccacaaccttccgttccgggacttcttcgccctcatcgggaacgctgtcaatgagcgtcttgtctttctcatccactttcagcaggacgttcagttcattcaatcgggcggttttttccgccagctcctcctcgcgggcaaagggcgcgcccaattcagcgcgggcattttcaagctgcccttttgtttcctccaggctgctttgctctgcctgcaagctccccgcaaggttttcaagggcattgtccagacgggcgatattgccgaacacatccgcgcccagcgtcaccgtatgggagagggtgcctttcagggtaatgcggtactcgttgctgataccatcataggccagcaccatggaaaagcccctgtattctcccagcaaaaccgcgtcggagccagtcattttgctgcaaacgtcgatgatagctttgccagcgtcctctttttcggcatactgtttgccctcgatcaccatgccgcagaagccctcttgacctttcggatgggcggctgccagcgccacatccttctcatagcccgcaatccgttctgtaatccgagcgatgtctgccgggtattcgcgcagcaccagctcctccagggaataccgctgattgagatagctggccttgagcatattgagctttgccacctccatatccaaattgcatttttcaatgatgagagggttgccggtggccagcgccttgatctcggaatagctgagggccgtttcgtccacatcctctgccactcggacaggggccttgctggtcatgatctgagcaatgaatttctgcttgttttccacaagctggtaaaggtaagcgtcaaacgtaccctcggttacatagcggaagatttccacctcctcgttttcattcccctgacggacaatacggcccagccgctgctgaaggtcggaaggccgccaggggcaatccagatcgtgcagggcgatcagcctgtcctgtacgttagtgccagcgcccatcttctgagtgcttcccatcagcactcgtatctgcccggcacggactttcgcaaacagcgccttcttttttacctcactgtcggcgtcatggatgaacgcgatctcatcctccgggataccctgctccatgagcttctttttcagatcgtcatatacgttgaaagagccgtctttggtgggcgtggacagatcgcagaatacaagctgggtcgaacgctgttctttggtctgttcccagattttgtagacgttccgggcgcagacagccaccttgccgtttgggtcgtcggcagccagcgggttgataagacgcatatccagggccagcttgcgcccgtcattggtaatgcgcagcatattgtccacatgggggtcaacgcctccatcccggattttttccgcccgttccgccagccctttcaccatctcctgctgaagctcggacggcttgataacctctgtgtgaaagttggcctttggcacgggaagatggagcatatctgccgtctggatgtcggccacctgtttgaaagcggccatcagctccggcagattgaaaaacttggcaaaccgggtcttggcccgataaccggtgccttccggggacagctcgatggcggtgatggtttctccaaagtcgctggcccaatcgtcaaaatggatgaggcccatttcctgcaacagcccgtactgcaaataccgctggatggtgtaaagctccaccatactgttcgagatgggggtgcctgtggcaaaaattgtgccgcgccctccggtgagttcatccagatagcgacatttcataaagaggtcggaacttttctgcgcttcggtctgggcgatcccgcctacgttgcgcattttcgtcattaaaaagaggttcttaaaataatggctctcatccacaaacaggcggtcaacgccgagctgctcaaacgtcaccacatcgtccttgcggctctggtcgttcagtttttccagctttgcctctaaggatttccgggtgcgctccatctgcttgacggtgtagcgttccgccttctgtgctttggcctgttcaatgccaaacaggatttcatcaatctgctgctgtaaaatggcctgctggcgctcggcgctcatggggattttctcaaactggctgtggccgatgataaccgcgtcatagtcgccggtggcaatacggctgcaaaacttcttgcggttttgtgtttcaaagtcttttttcgtagcaaccagaatattggcgctgggatagagctggagccattccgccgcccattgttccgtgagatggtttggcaccaccacaagcgacttggtgcaaagccccagccgtttcatctccatggcggcggccaccatttcaaaggttttgcccgcgcctacctcgtgagccagcagggtattcccgccgtacataacatgggcgatggcattgatctggtggggccgcagcgtaattgccgggttcatgccctcgaaacggatatgctggccgtcgtattcacggggacggctggaattaaaggtttcgttgtagatggcgcacagccgttccctgcggtcgatgtctttccaaacccactcggaaaacctctgcttgataagctcctgcctgtcctgggcgatagcggtttcttttttgttgagaaccggctttttattgccatgttcgtcctcgatataatcaaaaacccgcacatccttctggttcagggtttgctccaggatgtggtaggcgctcatgcgcttggtgccgtaggtggtgttagccttgacattggcccggtcaaagtttttctcggtgatattccactggccggtggactcggagcgcaggattttgatacgattctgggcctgcccatagggagtgagcagctccaccataaactgctgatatacgtcgataggaacccaattcgcgccaatacgcacaccgatctccccagcgcccaggtcgtgaggctggacagcctccaaagcctccacctgtttacgggcggctgccttttggctgtccggggccgcctccagaaaggcttttgccatccgcagcttgcggcgtacattccccgaaaggtattcgtccgccgtcacgggggaaaaggcttgcaggctgagggaagctccccgcagcctgtccgggttttccgggccttcgatgttgcggaaaatcacgccggaaagctcggcctccagttcctccggggatttgccggaaagctgggccatatactccatgtctacacgggctttctctgcaatcgaaacagccagggcctcgctggcggtgtccacgctggtcacagccacatggggccggatggtgcgtttggtgaacatatccgtttttctttttaggctgccatcttcgtccagcacctccagagaacacaaaaggcaatagctggagtcctccgaaaaggccagtttattgccccggctgctgataaggccgtatttttttgtgaagctgtcatacagggtattgagctttgcctgctcctctttgacgtctgcgtccggatagccttcggtctggtagtcgatgagccggcgcacacattcccgcagctcgatcatgccccggattcggttttccgccgtcacggatacctccaaagggtgcatacggctgttttcccgatagtacacctgtccatccacaacggtataactaaagttcctgacattcgggtcggcggggatggagcggtcttcctcctcgtccagttcctccagctcgtagggcttgatctccgcctgcaaaaactggacggcttcggcaagcagctctgacaggtcggccccctcgcgggctttgcaggcgctgtccgggccaaaccgcgtggattccatcaccatgtcgcctaaaaccatctccgggtgctgcacaaaatagctgttcatgcggatgccgttttcatccgtatccaaatgcagccaatccggctccaaatccgtgatatggtcgcgcttttgcagaaagaggatgtcgctggtgacttttgttccggcattttgcttgaaggtgttgtccggcaggcggatagcgccaatcaaatcggcgcgctgggccagatatttgcggacggcagagttttccttgtccatggttcccttgctggtaacaaaagcaataacccctccgggccgcaccttgtccagcgccttcccaaagaaatagtcgtggatgagccagtggtgcttgtcgtaccgcttatctatcaccttgaaatccccaaaggggacgttgcccaccgctacatcaaagaagctgtcgggcatttgcaccttttcaaagccgttcacggaaatgctggcattctggtaaagctgctgggcgattctgccgctgatactgtccagctccacaccgtaggttttgctgcctgccatatctgccgggagaagccccaaaaagttgccggtgccgcaggatggctctaagatattgccctgctggaagcccatctgggagagagccttgtagattccccggatgacaacgggcggggtataaaaggcggtgagggagctggcccttgccgccgcgtactcgtcctcgtccaaaaggcttttcagttcctggtaatgggggctggtttcttcaaagcagtccgcaaggccaccccagcccacatagcgggatagcgcctcctgttcttccggggtagccagccgttcctcggcctcgatctgcttcaaggtacggatggcggctgcgttagctgcatatttttcgctgggtgtgccatgccccagggcgtcatcagtgatatgaaaatcatggcgctgttccctggggatttccgggtgtagaggggcaaaggtcacgcgctcacggcgggggcgcttgggcaactgcgggagcattctttcttttagaggttgtaattctgcctgttcctctggggagagagcctgtgcagcttgctcgattgcatattgattggggaagttcctgaaaacgcacagccatctgttttcatgaatgtcatagacggcagcgccctcgtaggcaaagtcgctttccccctccataacgccgtccacatacttctgtgcagcctgttccgcttctgcaagcgtttgatacctctgcttgtctacaaaccctttctcctcgttaggatacacgactacttgataaggcggggccatcaggcggtcatagcgccctatatcctccggggcaagccattccggtttttcagggagagcagcatataattcccgcattttatcaagatgcgttcttacatatccagaccaaaggtgcttttccgcccgtttgccagcccccagaaagtaatcgcagtcggcttttaggcggctcaacagccggtaattctcctgagaagccggatcaccgttaaaaatgtggatggattccagttcttcctctgaagcagagataaggttatcaaagaccagttcctccagctcgttttggatgagttcctccaggctcttgtactgcctgcgctccaggaattcgccgttcagatacctctctatgcggaagttgaccagatcagcgttgacctggatggggattttctcatctgtaatagtggtgtaggcaagacccacattccccaggtcgctgaaatcagcaggctcgttgtattcatcctcacaaaactcgttaatcagatcctttgccttttccagaagttctgtatccggttcctctgtcaaaaactcacgctcaataaagcctgcaatttcccggttgcttccttcgcctccgtgggcttggtattcggcaatgccgtctgcgatcaattcttcggaagccacaaacccagcttcttccagataccccgcaatttcttcccgctgggcctgttccggggtgagtgccgggggcagctcctccatttcttctatacaaagggtgatgtctgccgcgatttcttcctccgggtcggcatggtcgaggaaagattgcagaagccttcggatttcctcacgccgggccgggtcatggagctgttctgcaatggtttctactgcctgcgcgtcggtatccccatagcccatccgggagccgtcaaactcgccaataaaatacagcacttgggccgccagcttggaataggggtctgcggcttcttctttttggggtggttcctgcactttgggcggcgtgtgaaacacgggcgcgtcctgagtggcggaaaccgtcatttctgaggtgtcggcaatatgctgaatctgatcccgcaccgtctggggcatttcctcatcataaaattgcacggtgcggtcgggggcgatatgggccaccgttttgtaatccccgtgttcttcctccagcctgttccagacagtgaggccgttccccagatgtccatagcccaggtcataggctttttccgggggcatggcgggggccgcaggctccttgtgttccgcaaagagggtaaaagtaccctgccggaacgcagaaaggttttcaaaggctgtttgccgccacttatacatccggtcgtcctgcggggtggcttcccacaccggcaccatcatctggtagatttcctccacgcgggccgggtcgtcaagctgcggctcgatgagcttcaccgcgtcccaatagtcaaagccaaacggataggggtgcggctgctcctggggtacgttctcaaagaaagtgtggatgttccgggcaagctggtgtttttcatactgcggcatagcggcccggtcatcctcggataaaaaccgcccctgggcgatcatggcgctgacgcgcttttccaccgcgttccatttcagctccaccttggcgtaaggctctgtgatactgccatggctgaaatggacgcccttgccgggctgataggtcacgttgtcatttccgccatgatacccgctgtattccccatggtaattctttaagaaatcctcgcgctccctgcggtctgtgtggttgcggtaaaaggaatacactgccagccggtagtcggtgctgcgttttcctccgcgcaaaagtctgtcaatctcatccatggagatatacaaacgccgctgagggtcataactttcagcggcggtaaagtgcagaggttcccgctgtaaatctgtaagctgtgcttgcagcacaagaggccgataaaaacggaaacgcagaatgtccgggttatcctgataggctgcggcaaacgcttcatattcggagaggatggcctgtaagctatcttcccggcctaacagccctgcgatttcctccactgcctccgggaatccacctggtttatcatagatggctcgcaatgaggggaaaaaccgcttttcttcatcctcaatgtcacggaacatcagcagcagccggtcggccaggtcatggatttcatagtgatctacttggtcaagctcgctctggggcatataccgccccagctccagcagttcccggatacgggctgccgcctgttcccaggagataagcgtggcgctggaaccctgggcgctctcgcccccggctatgcggattccttcggcattgtaccagacagcatacttgcgcccatccagacagaagcccgcgccgttttccccatagtgttctgcaaggaaacgggcgttgtctggcttatcctttttgaaataggcgcagatggtgaggcggctgttctcatggttggagccgatacaaagtgcctcatcgatcacctgctggggcagcgcatgagaaaagagggaaatctggtttccgccttccgactgcggctggctgaaaactccaaaatcaaagagggacatctgctggccctcctgtgtggggagcttgcggatgtccgtctggataaagtattcttttttgtcgatgagctgggctgtccattccgccaccaaaccccaggaaaacacggcttctttggtgcgagatgggtaagagccttcccacatgagcagcccgtcctcctgcggcttataccccaggcgctgcccatctgcaatgatttcggtgtacctgtcctggtaagccgttttcagataatcggcccgttcctgcgtatcctggtggacggagaagaaaagctcgatctgctgtttcttatacttgaggtcatcgtccttattggcgataacggccatgatctgcttttcatccaaaaaagcgggcagctctgggctgtccgcttcctctgcatttagggtgctgggctgttccggttcggaaattagttgtaaatcagctctttcagtatgatctcctccgctgcgttctgaaggttgttcatcagccctacccacttcatcgggtcgcgctccttcagctcctccgtcacgccgttctctttggccatctgtgtcaccatctgctccatctggcgctgggccgtctgctcgatctccgccagatggctggagagctgcccgctggtcaacaggttcgtgtaggtgatcctgcggtgttctttcagaaacttcttccgaagcaatgcgtatttcccagagggagcctccggctcctgcgggggcagaaggttcggcaggttgtagtcgccctgtctcgtgtatgtgatcccgttcattctcaaaactcctttctgacggctggtttctctgttcagttacagcatactggatttgcggctggcctgcaaatgtgcgattctctttttggggctgtctttgcagggcgaggacggtgcgggaaatctcggaaaggcacatctgggagatgtcgccggtggccacgcccagggcgttgagggtttccggcgtgttaaaattcagcacatcccggaaatcctcatcctcaaaggttccggcagggtcaaggccgcagcgcaccatgagcatatatccaatgctgttttccagggccttgcggtacaggacttccacgttgtattcgtccaattcctctaaaaagctgccttccgtaacggttttcagttcggagaggtagtcctggatgttatcctccactgcgtttttcgccgcagagagcagggccgcgcccaaatcctccttatgctccagctcgccaaagctgttctccagcgtttcgatgatttccggttcatattccggcctcacagcccaaagagggatggactgggggaagttcccctcatgggtgtcggaaatgtcaaagtaatatttcagccggggcctgcccgtatgctcgccgtcaaaaacagcaatgccattcgcgccccggtttacccagcgcccaaaccgtttattccatcgctcgatctccaggacggcggtggcgtccgggcgctgggcatagacaagcaactgctcatcaaaggaaagacggtagttgcggcaggctgaggcaagaaatgcctgccactgtgccggagctgtcacacttcgctgggtttcatggtacagctccgtcaatgctttgtatcgtatcgccatcggttgcacctccttttttgttattctttttctgtgtttttcagctccgcgctgtaatctcgatccgggtcatactgcctgcaaagggtaagcagaagcagccagatggtttctccggcttcgctggggtacagccgcagatccacgcaggacgctccatatccatctgtaaaaggcgttccgtaggccatacatttggagaacagccgttgtgccatctggcggtattcctcatacggattgttttgggcgtgttcacgcagaagcgtaagcagaagattaaaccatgtggtgtgtgtttccagttttacgggcggcagatttgccatttttctcacctacctttccaatgacgcagctttgcgctgtcgggatttgactggttgaccctgctcatcgtagtttttggggtctgcggcaggggtctgccatccgaacatggagccggccagcatggcggcctcctgcgctttggtgacaccgtttttcacattgcagtcatccgcgaactcccgattctgtctggcgtcgggggttgaaaaatcatagcaggggctgtatccattttcacccctggttaggagaatcagttccccggatgaaggaagtacgctgaagcattgtgcaggcagagaggagcgtaggggaatgacggtgctgccgtttcgttccatcatctcagcgaattgatagacatgacagaggttatcccatccaccgccaatctccatatggcactcgtcaatataccggcagcttcggtcaacatgactgccatcggaacgctgaatacggatgtggtcgccgtctggaatacggaacagctccctgccgctggaagccataaatcgaatgccttcttgggccttctctatgtggtgttctaaaaaccgggcaacgtaggcgtagaggtaaaagttataatctccatagttgagattacaccgcagcatataggtgtgctgggacgtttgcaccttaaaaccatactcggtgcagtagttcccctcaaattcagcctctggatgttgacagcagaacctgttcatgctggcccggctacaaagcagcccatccttttcccgcaaggcgttgaccacttcgtcaaactccgccttgaactcaccgtccttatattcctttcggcggtcgaaccaggaagtataaaactcttgcccagcgccaaaatccccgcgcagatagccgatacagcccgtttgaccctcgatctgactgctctggctgtatgcgtacagccgttcctccggggtcatgctggtaatttgaaacttcatcatcgttcacgctccttgtgttttgcagtttttgagtggggagtccgcgccttttccgccctcatcttttcccgtgcctgccagtattccgggtggaaggtttgcaggctgtcgttaatcacagcctcgtattccccaggggcaaaatactcgttgacaggcgcttgatacagccctctgtccatcagctcccgcaatgccaccggcgcggcgcagtcctcctcaaagcaaaggtagccgcgctccataaagccgcaggctctggcttccttgcaaagcgccttgtctgcaagctcccggctgaccataaccccgccatggcctgcggtgctgacggaataagcgccggggcaaagggtgtggcaggtctggatttctccccagggggaatcggcgggttccagctccatcttgttgggatcaatgccgcgctgctccagatattgaacctcctcatgcgcccgcgctaccaaatccttttgcgcgtcaaacaggctgctgaaatagtggccccagtagtaatccgtccggtctttgcatttccaggtaacgaattgctgaggcgctgtcaaatggacgcccaatacaaactcgctttcgcccacatggcaggaatccgttatgacatatcctgcattttctctgtaatccatcatcgttcacgctccttattggttttcttttgagcctgttcctgctggatggcagtaagcccatgcctggcccagccgggaaggttttccggctccatcgttcccatcacatccatgcgctcataccggctctctttgccggtatagagatcaatgcaaaaacaggcggtgccccggctgtggggagaagcgccaaagccgcccgtgcagagcttgagttgatgggttgccctgcggtattcccggcgcagcacatccggctttaccaccacgatttttccatgcagatcatcctcaccggaaagaggggtgcagctctccgctgtgataaggcggtcgtttatgccctgtatgcggggcttgttcagttctatgcgggttttctgcgcttgctcggcaacccgccggccgaacagctctgcaatctctgggaaatcatcacttgccatcacttcgctgtattctgcaaacaaagcattttgacggcaaaaggcgcacatatacttcatgccggtttcatcccgtggattttcccccagaacaatctcccggtcgcctatatgcagcccttggatgatctcataatcaccggccatgcgtttttcctgtaaatcatcgttcatctctttgcctccgtttcgctcaaaataaacgccttgatttcctttacactggcgaaatcccgttcatcccctgtgaggtagcgcaccgcctcctgccattgagagaacggataggcattttcctccatccggcgtaggtcggacagcgccatccggcgcaggaacggtgcaagattgaggtcggaaatgtagcagccgcgccgggccgccaggacgtccaatatatgcagctcgctcatgggcgcacctccatccctcccgcctctttcagaagctcctccaccagcctgccgctgcggattttgttgcggtcggccagcaccttgttctggacgcacagcaccgcccggatgttggggacggtaatgccggggatctccaccatctcctccggggtgacggtgagaagctgcaccggggaatagcccgcctgggcgaaaatgcggaacagccgctgttcaaatggttctttcatctgccatcaagctcctttccagttcttttttgggtatgtaagaggggcggccccgtatggccgcccctgtggcttctgctatttcttccggcttctgattttaaggaagatcagcccgccgatgatgaaaagaacaagcccgatggcaatgattgcttttaattccatgatgatttcctcctgacacaaattcaaaccgccttattcagcggatttgttacccttttttctcttgttcacatatcccagaatacccagcgtggcagcgcccgcagcggacacgcccatgagggccatccaaagccacggcttgctgtcatcgccggttttcggtgtgtcgcgcagttcattgtgcatttgcgccacagtggtcttatccgccaggattgtcaccgtcttatccgcaggcagcacatagctggcgctggccccgtccgacacctcggacacggtgtaatcgcctacgcgcaggccctcgatgtggatttcaccgtttttatcggttttgaaggtctggtcgtaaccgttcgcgcccgtcacgcggaaggagaagccctccaccttgccgtcgctggatgtcttttcaatccgcagggagccggtctgggccgcgttgacaaagccttttccggcctcgttctctacctcgtagattttgccgtgttcggcgatctccacatagtaggcgttttcatccagcaggaagccctccggcgctttggtttcctttacgaacacgccgccgtagaggatatgggccatctcataaatgccggtgctggtttcctccatcttgcccagcagttcgtcgccctcgtccagctccttatttccattggtatcgcggtacacctcgaactcggccccggtgagcttgttgtccgggtagtccttatccactttcgtgagccgcaggttgccgtaaatgcgctcgttggcaagggagatttccactacctgcccatcttcctccacagtgacggggatgacctcatcagagagaatgaagcctgccgggctttccagctcttttaatacccaatccccaaaaggcacatccgcgaaagagaagctgccgtcctccgcagaggtggcggtggcaagggcgttttctgcggtaaactcggtttcatcgctctgaaagaggccgatcacagccctggaaaggcccgtgccattctcatcggttttgaggccccggatttcaccgcggatcagctcattggaaacagcctcgccattgttggcggcaatctccaccacggccagggaaggcccgccgtattcaaagctgaacgggaaggtttcaccattcagcaggtaatggctgtcggtggacagctccttcagatagaagctgccaaaaggcaggtcggtcttgcacatggcctggccgttctcatccacagaaacgatttccagaagcccgtctgccgggatgatggagccgtccgctgcggtgatgtcctcctgggcatagaggccaaaggtaacagcggtgatttcgccattcatgccaataccaaaggtttcatcctgctccagtaccttgtcaagcgtcacaagggctttctggcgctggttgtagaagctggcagaagtttcggtgatttcgacttcctggcctgcatacacaagctccacctcggtgatattctcgccggtgtccgccatgccgtgggggaactcgatttctttcacctggaatttgcccaggtagagaggctggctctgggccgtcccgtcctccccggtggtgatggtgtccaccacttcgcccgcagaatagcgcagggtgccgtccggcgtgtagacgtcctccaaagctgtgatctcaaacaccgcgcccggcaggccggtcacttcgtacaccggctgataaacgccctcgttttcctgcacggatgagaatacttcgccggttttgctgaccttgataacgcctttctgggccatgttggacttggtgacttcgatgactgtcacgccgccctcctcggtagaattgtcctcggtcacatcaaaatacacaggggtgctgtccagcacatagccatagggggcctgcacctccaccagcgaatagccggagccatactccagcttttccggggtgacaagatagccctcggcattggtgtaaaaggtatcaatcgtggtgggcgtcggataggtgaaggtcatttccaccttgctgccatccgggcggtaaatctggaagcctgcgcccgcataggggatggtgacgccggtttccgcgtccaccttgactacttttatatagctttcaaaggctgcattgttgatgagatagcggtaggtctgcccgtcctgggagatatacacctcaaaatcatccatcagctcccggccctcccagcctttggtctgatggacgatatacgttccatagggcagctttttcgactgcgcaaagccattctcatcacaaacaagaacatcgcgctcggagtcctttgccgcgtcatagctgcccgcagctttcagatagatttggaactctgcgccttcctccggggtttcaattcctgtttcgccatcgtccgtgtgtttgatgatggcaatatcccccttgatgatctgctctgtcacatcattggcggtatcattcagctcaatggtgtatagctccggctccgcgcccacatggtggatggtggaatccacaaggtagccctcgctgggattgatttcacggatcgtccagtcggagtcgcagacataatagccggtggtgaactgaccattctcgtcggtcgtaaagctgtcgatgagggtatcgcccttatacagcccgtaggtcgctccggcaagggagccgtcgccctggggcgttcctgtttccacatcgctcttggtgacggtgacacggaactttttgaggatattgttcacggttttatccgtgacctcattccattcgatggtagctgtctgggcctccggcaccacatagcggatgggggtatccacctcctccagcacatagcccgtgccgatcagcacgttttcaaaccttgccactcctgtggaatccgtcaccgcgtactcatccaccggcaggccggagagggatgtgccggacaagtggaaggtcatgccctccgccaaaccgtcctcgctggttttggtaacttccaaactgccacgcttgagaacattgttaaaggtcacggtagccgtctggccgctgacgatggtgacgcgctgggtggcctggggttcatatttgtcaatggactgctcggttacggtgtaaacgccgggattgaggtcggtaatgtcgatttcacctgcggcattggtggttttggtggcgttatatccctcgccggtgatggtaaaggaaatcccctccaccttgccgtcctcggaagttttgagcagcttcatatttccggttttcacttccagattgaggtagcccaccatctggtcggaaaccgtcgtgccgtaggtggcaaagtcctgggtgccgcccccggtcacaccgtccgtccagaccaccacgccgctgcgctgggcgctgatcttttccgctttcacggttacagagcctttgagggcctggctggatgtgatggtgagctggctgccgtctacggagaaattcagccctgcggtgctgctggtaaaggtgtagtcccccagcacgccgttggcgtctgtgagggtgacagtgtatttttccccatcccatttcagctcataggcccccgcgtctgcggtgctgctgaaaaagctgggcagcatggtgtggcgttttaccgcgctttcaatcgcggaatactggctgaaaatctggctgcgcaggggatgttccgcgctgatatattccgttacattgtttttcccctgggcgttggcgtccacatggttgaactggctgtcgcgctcgcccacaatggtttcccagactaaaagctgggtggcgatatatccggccatctggttcgcgtgttcagggttgccgctcatccatgaggtgctggcgttgccctgccatccataggtcataatgcgtccgatatattccttgattgtgttgggcgggatggtggggttgaggcttgaggggtagttgtcccagaaatcctccccgcgccccgtatattggtcgccggagtggacgccgatccccggttcgatacagtagatggcgcgcccgttgtatgcgtcctgggtgtggacggaaaagtgggtgcctgcgctggttgaccatccgcccaggaagctgagggccggatggccccagcctgctttattggggtcatttgcacggggaatatccaccatatacgtcgtcatggtttcacctgcggcaaacgccggaacgcctgttcccgcaagcacgcccaggcacataaggagcgccatgagcagggagagaggctttttcagtgttttcatcttgttacctccttgaaatggccgcaaaaaaagcacatcgctttggatgtgctgcttccggctggattcggtttacgttctaaaaaagagaggcacgcccggcctttctcactctttcaaacaatctgccgtctgtttgtgaaaaacaggcggggccttttgatactctaagccgccttactatatcttcttttttaggctgtttaggttgtttggaaggggtgaggtgtggagaggggaaaccggcaaagccaggcgtttccctgcaaatgggcgcacttctcccttgtgagtagggttatcgctctaaactgcgctggcgcttgcggtacagctccagcgccttgatgatggtgtcctcgatcttctgcgcgggcgtccccggcgcaaaatatttgttgatccgctcctttgggattttgaattgctctttctgattgggcttttcctccttcataatggaaacaagcgcgtccttggccagccgttctccaccgatttttgcttcggacatctggcgcattttgatggcctgggcgtgggacggggtgcagtccagctcgtccataattgcaaacaggtcggcctgctcctctgttcgcaggtaggacagctccaccgcaggccgcagcgcgatttgcagcgtttccgggtctttcagcaccgaattgtccaccaactccaggatttccgggatgaggttggttaggcggatatatcttcgcacctgcgtttgactatcaccgccttctttgccgacaatacttgcagattcttttccgcttaacttccaacccactgggtcggaagttaaatccgtcctctggccttgccttttcatcgcgtccagcttcatcttgtaggcaaacgccttttccgagggcaggatttgttctctttgcaggttggaatccaccatgatgatcgtggcttcatcgtcggtgagctgccgcacaatacaggggatttctgcgaggtttgccagctccgccgcctttttcctgcggtgtccggccaccatctcatagccgcctgactgcttgggccgcaccagggcaggcaccaaaacgccgtattgcttcacactctccgccatttcctgcatggcagcgtccatccgcaccttgaatgggtgatcgggaaaatcgctgatttccgaggggttaaggctgacgactttctccagacgcgcctctgtccgttcttcctctgtggaaaacaggttatcggctgagggaagattgaagtttagcgcgttgtttttcgccatctgccagcacctcctttgaaaaatccgcgtaagcctgggccaccttgctccccttgtcgtaggcgtaaatgctcttgcctgcggcgctgatttctgcggctttaattgccacggggatttcggaacggtagattttcagaacgctcccgtagctctgacgcaggaagtccgctgtctggcgggccagattggtgcgtccgtccaccagggtgagcagcaccccgtccaccttcagggccgggttgatccgtctttttacccgcgtgatgtttttgataagctgggtcatgccctttgcggggagatagtgggcctggacggggataatcacgctgtccgccgctgccagggcattgatcgtaatcatgcccagcgacggcatacagtcgatcagcaccacgtcgtagtttttctttgcctcgttgacataggtgcgcaaagtgacctcgcggctcatggcgttgacaagcgtgacctctaaatctgacagttcaatgttggcaggcatgaggtctacgccctcgtggtggtgcaaaatgccctcatctgcgctgaaaggctcatcgcggatgatttttcccatgacggtggcaagggtggtctgcaagctgtcctggtcttgccagcccaggcaggtggtaaggtcgccctgggggtctgcgtcgatgagcagcacctttttccccagacgtgcaagtccaatgcccaggttgaccgtcgtggtcgttttgcctgtgccgcctttctgattggctaatgcgatcacacggccattcttcgggcggcttctttgttccggcattttcatgtcctccttttccatagatttagctgcccgctggcaggacggacagctatgtatgagggcatgaaaaaaggccgtctcatctgacagcagataaaacggcccttttcggacggggatatgtagtttttataccttcttcaccggggcgcacatcaccttgagcagaagttcgtcgatacagccggtgtcccggttttctttcagcatggcgttgcgcaggttgttcaggctctggatcacaatactgttctccgtgggggtaagatatattttaagtttccgctttctcatttgacacgcctcctttgtgccttctattatatatggaagaaaccagtgccgcaaatgtgcgattttcaatcattggcgaggtatgtactaacgtctacctttaactttttcattgcggcaaggattttttcgtattctttacggcgtggaatgcgtgattctctttcccagccggaataagttgtttggccgattccgatggccttagccatttgtatttgggtcaaggaaagctcctgccgtacccttttcaaaagagaggagtacgggcaatctacaaaggcggcatactcatccagaagcctgttgcggtcaatacccagttcattcgcaagcgccaccgctgtcttgtacttaatagggtgccggtcgttctcatatagtaccagtgtcgcaggtacaatccctattttttccgccagctctcttgtggtgaggccctgaaatgtccggtgatacttcaaatattggcccggtgtggtacagcttttgtcgtttttgtagtcaaaggtcaagtgaatcatgattttgcctttggaatagaggtaaattcctgtgtgattgaggttactatcggtaacactatgtgatatttgcaattccatttcgtgtgtgataaactgtttgtgtcgttcatttgaacgtcctccttttgttgtccttgcagttgccagaccgcaagcctattttacaacaaaaggagtttttatttctacatcatcggcacaagccttcttttgaaccacgcgactatcgcgtggttttctgctgacaaaaagaccgcacaggctatcctgtgcggtctttaaattcaagaattttacagcgaaagctgctcgtcgatgtacttggcgcggtcgagcgcacgcttttgaagcaacgtctcgatcttgctgtgcgggtcgatcagcgaactgatcgacacatcgtggttcaaggcggaaatgaaatacgcgatatacttcgaaacatcgacctcgtggaaccacgggcggttgcgcagctctgggttcagataggtcaggttgctgccgaagatgccgtcgatcaggccctgctcgtacgccttgtcgaacttctcgaggccgttcgtgaagatggcgtacgtcgcataggcgaagaagcggttcgcgcggcgatccttgacgttctccgcgatgtcgagcacggaatcaccagaggaaatgatgtcgtccgcgacgaaaacgtccttgccctcgacggacgcgccgagatactcgtgcgcgacgatcgggttgcggccgtccacgatgcgggaataatcgcggcgcttgtagaacatgccgagctccacgccaagcacggaggcataatacatgttgcggttcagcgcgccctcatccgggctgacgatcatgaaatcattcttgtcggtcgagaggtccgggaaatccttgaagagctttttcagcacctgatatgtcggcatcaggttgtcaaagcccatgaccggcacggcgttctgcacgcgcgggtcgtgcgcgtcaaaggtgagcagattcgaaacgcccatctgctgcagctcctgcagcatgtatgcgcagtcgagcgactcgcggtagctgcggcggtgctggcggccgccgtacagcagcggcatgacgacgttcacgcggtgcgctttgccgctcgccgcctgaatcaggcgctttaaatcctgataatggtcgtccggcgacatacggttttccttgccgaaataattgtacgtgaggctgtaattgcccacatccacgaggaagaacagatcgtatccgcgcacggtggacttgatcatgcccttgccgtctccggaggaaaagcgggggcagctgttctcgatgaggaaggtatcgtagttcataccggcgcgctttgcccagcggaccagatgcgcctcaatcttctcggaaagctcttgtgcacccgcaagcgatacgatgccgagcggggccacccgattctcagcactgaaaaacgtctgtgattccattaccatttgataactccttcaaactgcatttttcgttgtagccgcgcaaaagctgtcggcatttgtcagttaaaatataacacaaactaccggatattgctacaggaaacctccgctttattaaatttttgttaatttggataacacagctacaccgaacggggccagtttaatggaatttaccctttcacctgtaccgtacaactcatagccgccgggcagctccaccgtttcctccgcgttgttgtagttttccacgaacacgacggcgccgttctcgccgattctctcgtgcgccgtgacgcccgcaggcagcgcggtgtcgatcgcccgcgcgatgccgagcgccgaaatcagcccgccgtagagatccgcaaggaggtccgtgccggtgcgcgccgcgatatagtacgccgcgccgctgccgaagcggtttttcgtcaccgccggctcgcccgcgtaaaagtccttttcatacgtgccgagcacctctgccgtgatcgggtggatgcgcgcgcacagctcgaacgcatcgtagctgcggccgttcacggcgacgctgtttttcacaccgtcgggcaggctgtcaatctcctcgttccacacgccaaacacatccatcatgccgccgggcacgccgccgagccggcacaggtcgctttcatcgacgatgccgctccagtacgtcgtgacgagtgtgccgccgttttccacaaacgcgcgcatcttctgttcaaagccggcgcggtacatgtagagcatcggggcgaccacgagcttgtagcccgagatgtcgccgtccatatcgacgatatcgacctgcacgcccgcatcccagaacgggcggtagtgcttcagcagcgtctccacatacttttcgtccttgtccttgttgcgcgggccggccgcagcgtcgagcgcccagcggttttccacgtcgtacacgatggcgacctgcggctttaccgcggtgccgtacacatcgccgcgcgcgttcatctcccgaagcgccgcgcccacctgctgcacgtccttgaaaacgcgtgtgttctcggttctgacaaaatcatacgggccgctgttgccgacatggtcgacgaccgcgccgtggaatttctcgcaggaaccgcggctcttgcggaactggaaatactgcacggagttcgagccgtgcgcgacggcctgcatcgacgagagcaggtgcatgccggggcgcttgagcatcgagacgggtgtccagttcgtcatgctcggcgtgctctccatcaaaaggaagttttcgtgctttacggagcgcatcacgtcgtgcgccatcgcggaggaaacggcgatctccgtgttgtccgtcgtgtgccactgggggtagttgtcccacgagacgacgtcgagcgccgggccgaacttaaagtagtcgaggccgtcgtaaaagcccataaggttcgccgtcaccggaatttccgggttcacggatttcacggcgtcgcgctccatcgacatgaaatcgacggtctgatgcgtcacaaagcgcttccagtcgagcacgaggccgtgcacgttcatctcgccgtgcggcgccggggcgttgatctgcgaccaatcggtgtaggtgtggctccagaaatcggtccaccacgcgtggttgaggctgtcgagcgtcttatacttcgccttgagccaatcgcggaacgccgcctgacacagcgggcagtagcattcgccgccgtattcgttcgagaggtgccacaggataacgcccgggtggttcgcaaaccgctccgcgaggcggcggtccatctcgcgcaccttttcgcggtagacgggcgaggtgtagcagtggttgtgccgcgcgccggagagctcgcgcaggccgctcggctgcacgcggcggatctcctcatatttctcgctcatccagagcggctttgcgccggaaggcgtcgcgagcacggtgtaaatgccgttttcatagaggttgccgatgatctccgcgagccagtcgaattcgtagacgccctcctgcggctcgaggtgcgcccacgaaaagatgccgacggaaacgcagttgatttccgcctttttcatcagctcgatgtctgttttcagaacctcggggtagcggagccactgctccgggttataatcgccgccgtgcagcagcttcgggaatttcggtgttaacggtttcatagggcaaggcctcccaaaagattttctgctttcagtatagccgctgcccgcggagaatgcaagcggaaagtttcgcgccgggtggcccgcttttccgtgcccggcatgcgcccgcaggcgagaggcggcccgccggagacactccggcaggccgcttcgctcgcgtttatttttttgtgcggctgcattccctgctccggcacgcgttttacccgcgcgcctgcccgaagccgtagtatttgccgtccatgtaaaccctgccgcaatagaggacgctttctccatcgaacacctcatactgcaccacgatccggcacgcttctccgttctcggtgaagctgaattcagcctgtgcggccgcattcggccccacaacgccggtcagcacgaagctgcggtcgccaaagtgcagcaccgtctgcccgtctttctcgacgatttccagaacatgctccagcatccatgcgggatctccggtaaacaccgccgtttccgcccccttctgaacgatcagctcgccgccctcaaggacaatctctgcgccgcgcagatcgacacccgtccgcgcataagtgcgctggatccagtcctgcacgccgaaaaggtcgctcgcgtacacggcgccgctcagcgccagcagagctgccagcacagccgcagtgcacacgaggcggcggggccgccgggcagtgggcgccggctcggcactgagtgaggtcacgcgctccatcgccgccgcggaggggcgcatcccgtgccctgcaccgccccctttcctcttttttcgggccctcactatacaaacggcgccgcgcgggaaattgtttacaatcgctccaaaaagtttatctgcaccgcagattgtgccgcatatcaaaaaggcgccgcccgaaaacagctcggaacagcgccatgtgtatatgcagttttgaacgcccgcacaggcggcccatgcagagcccggctttccgaaagccgcgcggtcacggctttgccgcgggaaaatcgcgggcgagcttcttcatccgcacaaagtacgtcgcgacgagcagaaccgccgcgccggcccacgccgccacctcggcgtagaagatgccctcctgccccataagcgcgggcagaaagatcgcgacgccgatgcgcatcagaaactcgacgatgcccgaggccatcggcatcaccgtgtcgccgaggcccattaaagcggagcggtagatatgcagcatgtagagcaccgaaaggcagatgctcatgatattgagatagtgcacggcgacttccgtcgagagcgcgacctcctccggcgtgccggagatgaacagcgcgaccgcaaagcggccgagcagcagcaccgccgccgtgatcaccgccgaggtcagaagcgcgatccacgtggcggaatgcaggccctttttgatccggccgagcaggccgccgccgaggttctgccccacatacgtagtcaccgcgtagccgaacgaggtcgcggcgatctccaaaatgccgtagagcttgttcgtggccgtgaagcccgcgacgaacagcacgccgtagcggttgacgaccgactgcaccaccatgccgccgaccgcgataatcatgttctgcgcggcgaccggcaggccgagccccagaagccggcgggccatgacgggatccggcaggaagtattccttcttcagcttgatgatgtgcacgcgaagcacggcccgcaggcagtacagaccggcaaaaagctgggcgataaccgtggcgaccacggcgcccgcgatcccccagtggaacaccatgacgaaaaccagatcgagcacgatgttgatgaccgaggcgatcagcatcgcatagagcggcgtccggctgtcgccgagcgcgcgcaggatgctcgcaagcacattgtacgccatgatgatcgggatgcccgcaaacatgatgcgcaggtatgtaaacgcgccgccgatgacctcctccggcgtgttcatcgcgcgcaggatcgggtccatcgtgacctgactcagcacgagcagaaccaccgagatcgccgcggcgatcgaaatggtcgcgccgatcgagcggttcaggccctcctcgtcgtccgcgccgaagcgctgcgccatgtagatcgaaaagccctgtgcaaagccctgaatgacgccgagcacgagccagttgagccaatccgccgcgccgagcgccgccagcgcgttgacgccgagcgcctgcccgacgatcgccgtatcgaccaccgtgtaaagctgctggcacacgttgccgagcatcagcggaatcgcaaaggtaaaaatcagccgggcgggcgcgccctgcgtcatgttctgaatccgttccgtttttgccataaaatatttatcctttcaatacagactcttttgcggcccgcgccatgcggaaatagtacgtcgcgcagagcaggaccgccgcgccgagccacgcggatacctccgcgatgcagatggagagaaagccgaggccaaaggcatttgcgagcagcagcaccatcgagatgcgcagaagcagctcaagcgcgccggaaagcatcggcaccaccgtgtcccccatgctctgcagggagaagcggtagacaaacagcaggccgagcacccacagcatcgcgccggccgcgaaaagatacgggtaggaggcctcgatgaccgcctgctccgcaccggagacaaacagcgccacgatcggcctgccgaacagcacgagcgccgcgccgaggggcacatcgatgcaaagcgacagcagaaccgcccggcgcacgccgaggcggatgcggtcgagccgaccggcgccgaggttctgccccacatacgtgctgagggaaagcccgatgatgttgcccggctgctcggcgagcgagaggattttcacccccgtcgtgtatgccgcgaccgtcgcggagccgaagccgttgacaacgccctgcagaatcataccgccgaccgccgtgaccgaattcatgacgccgaccggcacgccgaggcgcagcagctcgcggagcatcgcgccgtccggccttgcgtcgcccttttgaaaccgcatcagcctcatgcggccgagcacgaaaaggcacatcaggccggaaagcgcctgcgcgagcacagtggcccacgccgcgcccgcaacgccccagcgaaacaccatgacgaacagcacgtcgagccctacattcaccgcggagctcaccaaaatcacgataagcggcgaaatactgtcgccgagcgcgcgcaggatacccgcaagtatattgtaaaagaccgtcgcaaagatgccgatgaagatcacgcggatatagagcagcgcgtcctcgaagatgtcggcgggcgtctgcatcagttccatcagggtgcgcgagaaaagaaggctcaccgccgtgatgaccgccgaagaaaccgcagccagatagccggaatttgcgacggcgcggcgcacctccgcttcatttccggcgccgaatttctgcgagatcaaaatggagtacccgtgcgtcagccccgtgatgaagccgaacacgagaaagtgcacggaaccggtcgagcccgccgcggccagcgcctgcacgccgacgccgcgcccgagcacgaccgcatcggcgaccgaataaagctgctggaaaacattggcgagcagcagcggcgccgcaaacgccagaagcagccgcaccgggctgcccttcgtcatatccttaaccatacccatcccctgtttcacccccgcgccgccgtttgacccgcagggcgggcggaggacgataaaatccatatagatacagtatagcgccccggcgcacatcgctctatctggatcctgacaaaaaatccagaaatccgcgcgcgtccgggcgcggggcctcgccggcgccgtgggccaagccgcccagacgcggctttcgcccgtataaaaagcgccgcgctccccgaagggcgcccggcgcacggcagcgtccgcagcttacacgatatagtcgaccgcaaccgccttttcccgcacggaggcaacgtatgttttcaccacctcgcagtggtaggggtcctgctggtacgcttcgagcgcctcggggctttcaagcgtcacatacaggcagacgtcgaacgagcggtccgaatgcagaaaatccgcgccggcctccacgtcgatcacctggggcacacggcccttcatcgtgagaaacaggtcgcgcagcttctcgcactccgcctgcgcgttatccttgagcttgatcatcagaacatgcttgaccattttgaatcaccttttcctttattttctgccgggcgctcccgtgcccggcttttctgcaaatttttcggccgccgcatccacacaggcgcctaagccgggcaaggccctatctttggcgcacgcccgacaccgcgcggtcgaggccagccgtgtctttgtggatgcggatgtcggtaagccccgcggcttcgaacagatcggaaacggcacgcccctgcgtttcgccgatctcgaccgcgagcacgccgccggagcgcagcttttcagcccacagcgcgcagaccgcgcggtaaaagacgagaccgtccgccccgccgtcgagcgccgtccgcggctcgcgctgtacctcgcgctgtaagtccgggagctcccccgtctcgatatacggcgggttggagacgatgaaatcgaacccgccgggcacggacgcggcgaacgccggcgccagcacatcgccctgcaccgcctcgaccgcaagctgcgggtaccgcgcgagattctcccgcaggtagccgaacgccgcgtcgaatttttcgacagccgcaacctccgcgcccatttccagcgcgagcatcagccccacggcgccggtgccggcgcagagatccagaccccgcggcgcggaaacgccggcgagccgctttgcagccgcttccacgagcacggccgtgtcgtctcgcgggatcagcacgcccgggccgcagcggagcgtcagcgccataaagtcccattcgccgaggatgtactgcagcggctcgccggtgattctccggctgaacgccgcgcggaattccgcttccgcccgcgcctccggcacgcgatcgccgtgcgtcagcaccgccgcgcggtccatgccgaaaaagtgctgcgtaaggcacacggcctcaaacgccggatcatccgatacggcagcgagcgcccggcgcgccccgtcatacagcgaccggacgttcatcttacgagatcctcgccgttttcggggatcacggcctccatcgcggcgatcgcggcctcgatcatcttctcgtccggctccttgaccgtcagccgctggaaccacagccccggcgcggcgatgatgcgcgtcgcgaggttgtcgtgccgcccgcaaagcttgatgagctcgtacccgatgctgacgacgagcggcaggcacagcagcttgcaggccgtgcgcaggaatgggttttcgaacgggatgaaaaagccgatcaggatgccgatcagaagcatcaaaatcataaagctcgagccgcagcgcgggtggaagcgcttttgcttttgcacgttttccaccgtgagcggcagcatgttttcgtagcagaagatcgtcttgtgctcggcgccgtggtagcggaaagtgcggtcgatctccttcatgcgcgagacaagcacgatgtagccgacaaaaatcaaaatgcgcagcagcccctcaaagacggagcgccagccgccgatccacgtgccgagcagcgactccagcccgttgaaaagcatggtcggcaggaaaaagaacagcacgaccgcaagcgcaacgccgagcacgctgccgatcgcgacgacggcgttcatcaccttatcgccgaatttttccgagagccaccggtcgaatttcgactcgctctccgcctcctcgtcctcgaggccggctttttcggccgaaagcgtcagcgccttcaggccgagccgcatcgtgtcgatcatagcgaacacgccgcggagaaacggctttttcaagatcgggtatttctcccgcagcgagggcgccgtgatgtcctccgtcgtgatattcccggcctcgtcgcagaaggccgccgtgttctttttcggccccaccatcataatcccctcgagcagcgcctggccgccgatggaggtaacgcgttttgtcatgtgcttatcctttctgaaaaaagagatcagtcgtcctgcctgcgctcgacgacctgcacccgccccgtgacggacgggatctttgtcgtattggaaagctccgggttcatctcgagcttcttcatcgtcgggattgtgatgatcaccgtcgtgccgatgccctcttggctgtcgatgtcgagcgaaccggaatgcagctccatgatttcgttcgcgacggcaaggccaatgccgctgccgcgcacgttttggttcgccttgtagaacttccgcttcacgttcggcaggtgctcggcggggatgccgcagccgttgtccttgatgacgacgcggataaagccgtcgtcctcataggccgcaacgcgcaccgtgccgcccgggttcgtgtacttcagggcgttgtcgataatattgataaagacctgccgcagccggttgacgtcgccgaggatcggcgaaagcatcgtgtcctcctcgtcgtagatcagcgtcttgtgctcggtgcgggcgcggtcggtgaacatgtacaccgcctcgtccagctcggcgagcaggtcgattttattcaaaatcaggcgcatgcggccgctctgcatgcgggaaaaatcgagcagctcctccaccatgccggagaggcgctccgactcgcggatgatgacgctcatgcccttttcatacgtctcgcgcccgacgccgccgctctggatcgtttccgcccagcccttgatggccgtcagcggcgtgcgcagctcgtgggagacggaggagatgaagtcattcttcatcttttccgccgcgccgagttctgcggccatatcgttgatcgactcgcacagcgcgccgatctcgtcgttcttgtcctttttgacgcgtacatcgaaattgccttgcgcgatcttctcggccgtggcgttcagctcgcggatcggctttacgatcgagcgcacgaagtacaggccggaaagcgtgacgagcgcgatgatcagaatgccgataccgacaaggcacagcaccacaaaggtgatctgccggtcggcacgctccatcgagacgacgtaccgcaccgcgccgagcaccgcgccgttcgcgccgcgcaccacgcgcgtgatcgccatgaccttttcgccgctcgtgagcttgccgatccagtagccgtagccggaggacgcgtgcatcgcgtcctcataatccggcattgtctgcgcctgatccggcgcaaagcccgtcgaagtcgagaggatcttgccggcgcggctgaccgccataacctccatcaggtttttatcgggaaagttttccgtgtagctgcgcgctgcggcattgaattcgttcaccgtcttcatgctggaggaaagcacggtgggcagctcgtcgctgcggccgaccagcgtcatctggatgccgttgtacgcgtagctctgcacgacgaacgaaagcgccgtgatgcacgcggcaagcagcaggatcatcacgccgaggctgttcaaaagccagcggcgggcgatcccgttgcggaacacggtaccctcccgttttttcttcgtctgcacgtgcctctcccctgtcttactggtcccagcggtaaccgacgccccacacggtcacgatatggcgcgggctgctcgcctcatcctcaatcttcatgcgcaggcgccggatgttgacgtcgacgatcttctcctcgccgacatagccgctgccccacacgtgcttcaaaatatcgatgcgcttgagcgccttgccggcgtttgagataaaatactccatgatctggaactccacctgcgtcagctcgatcggcctgccgttcttcgtgaacgagcggttgcgcaggttgagcgcgaacgcgccggagcgcagctcctccgaaaaattcggctccgcggcctgcgaaaactgcgcaacgcggcggtaaaccgcatccacgcgcgccacaagctccgacgggctgaacggcttcgtcacgtagtcgtcggcgcccatcatcaggcccgtcaccttgtccatctcctgtgttttcgccgtcagcagaatgatgccgatcgtgccgttctgcttgcgcagccgcttgcacacctcgagcccgtcgtatgcgccgggcatcatgatgtcgagaatcgccatatcgaagctgccgcccgcctgctcgtaaaggcgcagcgcctcctcgccgttcgccgcctccacagcctcgtagccggcgcgcttcaggttgataaccacaaattcacggatattctgctcgtcctcggcaaccaaaatctttctcatagcgtctgtcctttcccccgctcactcattcaatatcttaaaatccgcgcacaccgagcggatcagcgcgctgtccgccgaaagcgacgggtcgagcaccgccagcgcatagacccggccgcccatggcggtcaggtaaatttcctcttttgtctcgcccgcctcctcgcgcgcttcccattcctcctcggaatagaccgtcaccgcgaagaggtcctcacggccggccggcgcgccggccatccgctcatagcggaagaaggtcgaggtgcgtgtgaccgaatcgttcgcgcaggcgatctgcgcctcgctctcgggcagcacgacgatgtagttttccgccgtgttgacgatgctgctgcacaccggcgtcagcgtgttgtccgaaaggctgtaggtgttccacgtaatggtgtaggccgtggaatccgccgcgctgccctcagcgggctccattacgagcgacgcggtcggaatctccgtcacgccgtcgccgttgatgtcgcgcgccgataccgcggccgccgtgtcgcggtccgtcgggtttgcatcccccgattccgaaagcggcgcggtcaggcgctccgcgacctcgtcgtacccgatgacctgcgtcaccatgcggccgtccgctttcacgccgtcgagcacgacgccgctgcgccacgaattcagctttgtgaagagcgcgccggaatagcgcgtcaccgccgaatcgagcggcacggtcagcgccacgtaaggctgttcgccgtcgaaccggtagaggctgcccagcggcgacgcgcccgcctcctcgcccttgcccgcgcgcgtgaggtccatcacaaacagctcctgcacgccgtccccgtcaaaatccgtcagcagcatctcactgtaggcaacggcgttcatcgaaagctcgcgcacggcgccgtccttcaggctgtaaaccgatatgctcgccgtcgcggtctgcgggtcgccccagccgaccacgatctcctcggtgccgtcgccggtcaaatcgccgaaaaacacgcggtccaccagcgtcgaggtcgaagtgaactgcgcgagcgagcgccacgcgcccgcttcatcctccgccatgaactggagccgtatgccgcccgtatcgcccgccgcgcagaagccgaccacctcggaaacgccgtcgccgtcgagatcacgcgagatgatcgccgagcggtagtcgccgtttttcgggtaaacgagcgtcacgtcgttctcctccccgcacagcagcgaataaatcgcctgcctgtccgccgtcgtttttggcggggacatcagcgccggcgcgtcgaggcctgtgatctcgccgcaggccgcaagggcggacaggagcgtgagccccgcgagcagggccgctattcttttgagcatccgccgcaccggcgccacctcccgctcaggatttccgaacggccttataaggccattttagaatagtataccatatccccggcggcgccgcaaggcttgcggccggcaattcccgcccttcgaaattattaaatttttgtgacagcattgtgcttcgcggcttcgcgtggtaaaatttctataaatatacgcaagggggcggcgctgtggagcaggaaaacagaatacggcgcaaccgccgcaccggccttgtgctcggctgcctgatcgcgctgacgctcctattcatctggggcaactcgatgcggaacgcctcggcctcgggcgcgatgagcggctcggtgcgcgtgtggctcgaatcgcttctgcacataccgatcgacgaattcctgctgcgcaaggccgcgcacttttcggaatacgcgctgctcggcgcggagctttccctgcttttaagcctgctttcagaccggcgcggcgcgccgctcgcgcacgggcggaacctgatcgatttcccggcgctcggctttctcgccgccgcgattgacgagacgatccagatcttcactgggcgcggttcctccctgctcgacgtctggctcgacacggcgggctgcctgaccggctttttcctcgtctttctgatttttaaaattgtaaggagcaaacaccatgcaaaaccgtaaacggcttccccttcttctgaccgccctgatgctcgtgttctgcatcgcgctgaccggctgcgcgggccgccgcagcgtgaccgccgaggacttttccgccgcctgcgagaccgcgggcttcgaggtgacggacgccagcgagagcttcgacgcctccgtgattctgacggcgctgaccgtgaccgacgaaagcgtgagcgccggcctcttcgtctttgcctctgcggacagcgcgcgctcgaattacgcgcagatgctcagcggcgtgaaaacgggcgcaagcggtgagaaattcgtcgattccagcgaatacaaccggttctatttcagcgatgaaagcgccacaacgctgctctaccgcaacggcgcaacactgctgtttgcgaccggcagcgacacggaaaagctggacgcgcttatcgatgcgctcggcgtgtaaccgggcatattgcaaaaacagataaaaggcttccggccgcggtgtgcagatcccgcggccggaagccttttattttttcggacgacatgcgcgccgaaagcgcctgccgtcacaccttcaggtatccgcccattttcgccacggcgtccgggataaaggcgtcggcgtgctcgccgatatacgattcgaccagccggcccgcacccacgaaaacgccgtattcggaaaacaggctgcgcgccgcgatccgctccgaaaagcgcaccgtcacgcagaggaagaagcggctgccgatccgcccgagggcggaggacagcacatgcagtgtatggattgcccggccgaccgcgtccatcagatgcccgacggactcgaagcagaacgcgaacggaaccggcggtgagagaatccggatggtaccaccccatttccccgcgcttgtaaccccgcataatccttgcactatgctattttacgcaggccgcgctcccgccgtgcatggccgcgccgcccggcgcgccataaaatgcgcgggaatttttgccccgcgccccgcgcccggcacgcccgccagcccgaacgcgccgcacagctcggtacacccgcatctctgtgcggcggcgctcatcccttttccgggaatgcgtgcgcgtacaggtcgtcctgctcgggcaggtgcgtcacgtagccgaccgggattcgattccccgtcgcctcgatgaccgcacgcgcacccgccggcccaaacgcgccgcacagctcgatgcacccgacgcctgacgcgcacagccgcttcgccgccgcgcaagcctcctcgagattcgagacgccggcgatctccgccgcgcccccgccgatggcggcccggtccctttccgcgtcaaacgcacccataaggataaatgcaaagcgcatgtctttctcctttcccccgcctgcgcgggacaaaaacagcccgccgggcaggcaggctgtttttggaacgctatttaatcttatttttaaagcgcggcagaatgaccgccgcaacgatccagaacagctcgtagacaaagagcgcaaaggacgagatctggctcacgcccgcgatgaacgtgaggaaggcgaccagcacgaagccgatgaccaccgcggcgttctgcatcgcgacgatgaagctgatattcttcttctcgtcgatgcaggcggaaacgacgctcatcatcgattccacgcggcccttcgtcgccacatacgcgtccgcgcggccggtctgcccggtcacaaggcggtcgcaggcgctgtccgtctcggcgccgatcacattgaccgccgaagcgtcaatgccgaacagccgcccgataaactgcggcgtgaggttcgcatccgacgagcggacaagcagggagacgccgttgagctcaagctccgcgagctccgcctttttcttgcggtccgcgttgtaggtgaggatgaacatggcacagagcacgccgtccgccgccacgtagagcacctgacggctgccggtggcatagcggctttcgagcgcctgatccggcgcctctatgccgtgggacgtgagcagcgcgcgcgaaccgatcaggatctcgctgccgtccaccgtgccggccacgccgtttccagcctcaaaccggcccttttcgacctcgggcagctcgccctcatgctcgctgagcacctgctcgaaaacgccgcagagcgggccgccgagcgcctgcatcagcgcgccggcgcggagcacggcctcctcaagaccctcctccgtaaacggcttgaccccattgagcacgaccgtgccgcgcgggaacaggtccgccgaatcgacgagcaccgcgttgacggcgctcatgcgcttgatcgcctcatagcccgaaaccatcgcgccggcgcggcgcagcctgtggctcaggcggctgaccggcaggttcacggcaagcatgtttgtgactgcgacgcacacgcagcaggaggccgcgagcgccgtaatcgcaagggaagcgtccttcgtaatgacgagcgccacgacgcacaggagcagcgatgcgacaaggccgaccggcgcgagcatctgtgaggcggtctccgccgggtccggctcatacgaaatctgtaaaaagcgctttaggaagccggctttctgctggtaggcgatcgccggctgggaaacgaccgaggagcccgcgagcttcagggacgtgttgtagtcgtcgaaaatgcgcacggtgtatttctgctcgcgcgacgccacaaagcgaaaattcgagtggatgcgccggatcatcgtcagcttgccgagcgaattcaaaaacaggatgcccgccgcaatgccggcatacaggtgcacctgcccggtggcgagcgacgccgaggaaaacagcgcgcacaccgtctggatcaggacagctgtacaggcgacagccgccgcgctgtccgaattcgcgcggaactcgacaagcgcgcgcaggccgttcaaaagcgacttcgcgcagaagccgaccgcgatcatcaaaaagatcagggaaacgaccgtgtagccgatcgcgccgctcacatccgtgttgttcgggctgaagcccgcctcggcgatgaaagaggcgagcagaaggaccaccgtgctcacgccggtcgcaagcatccgcagcgtcagctcgtgcatcgtcgcgcgcaggtcgtgcgaaacgctcttcgcgtcggccggtccggtgtaatcgtcaagctgctcgtcgctgctcacgttggccgccgtcgtctcgggcgcctcctcgccgttcccgtcgccgaagcggatcttcaggcggtgccgcccggccgcggcgctcgtgtttccgtcctcggaatagacgcgcgcctcgctgagcagcgcgctctgcagcacatccgcattgatgatgtgcacgggcaggtcgcgctttctgtacgcggtcacgtcgctgaccggcgtggaaattttagcgggctgcggcgcggcttccgcggccggggcctcctctggctcgggctgtccgcccgcctcgagctcggcctgcttttcctccgaaaagctcgaaacgtcgtcgaactcgccgaccggcttttcctcctccggctcatccgaaacgacgcgcaccgagctgatttcctccatgtcctcgggctccggcggcgcatccgccggggcctcctgcacggtttcgaggatgcggcgcaccgaatcctcgcttacctccggcatgaccttcgcctgctgaacgccgagcgtgtcgctgccgggatcgagcttgatctccatcgtgcgcgtctgcgcgtcctgtagcatcgctttctggaattccggcaggttctcgtcgcccgcgccggcctctacgtcaatgccgtgctgcttcgcgtacgggtcgcccgcaaacgccgaaaccggcaccggcgccacgatgccgagctcgttctccacctcgtcgatgtccacgccggcattttccacagcctcggccacgcggcggcggcgctcgcgctgcaggcggtcgaaatccttcgccacctcgtcgtcgagctccgcggtgttctcgtcgaacagccttttaaagccctcgtcgctctttgtgatctcgccggccgcgtcaaagctgcgcgtgtattcgtcgatgggcttgagctggatgccgtagtacatctcctccgccgcgtcgatctcctcttttttatttttgcgccgtccgaaaaggccgcgctttttctttttcccgcgcttttcctcgctgcgctccgcctcggtgtacggcgtctccaccgtttcgaccggcacgggctccgcgtcggcctgcgcttcgggcacggccgccggctgcgcctctgccgcggcagtctcttcctgcgcctcctccggctcgtccgctgcggcctcctgccgggctgcgttttccgcggcgccctctctggcgcgccgctcctccgccaatatatcctccagtgtgaaacgattgtccgcactcatttcaatgcgcctccttttgctgtgatgcccgcccgctgccgcgcgatctcatagcagagaatcccgcaggcgacggaggcgttcagggagttgatcctgcccttcataggcagggaaacgataaaatctgatttttccttgacaaggcgcgaaacgccgaaaccctccgagccgacgacgagcgccgccgggccggaaaaatcggtttggcaccagtcggcgccgtccatgtccgccgtgtagacccacacgccgcgcgccttgatctcgtcgagaaacgccgcgatattcggcacgcgcgcgaccggcaggtattcgaccgcgcccgcggaggccttgcccaccgcggcggtcagccccacgctgcgccgcttcgggatcacgacgccgtgcgcgccggcgcattccgccgtgcggatgatcgcgccgaggttgtgcgggtcctcgatctcgtcgcagacgatcagaaacggcggctcgccgcggctttccgccagcgcgaagatatcctccgtttcggaaaacgcgcgcacggccgcaacggccgcgacgccctgatggttttccccggcgcacatcgcgtcgagctttctggggtctgcatccttgatcgtaacgcccgcgtcccgcgccatgcgcaggatcgcgttcaccgagcccgtcctgtctccgcgccgcacatagacgctgtcgatcggcctgcccgcccgaagcgcttccgcgacggcgttgcgcccggcgatgatctctttttctctttccttctccatgaggccgcgttttcctttccattggcatacttccgcaatatactagggattataccatacttcaacggcagattcaaccgatacgcgaaaaaagccgccgcaccggcgctgttttttccgccatttttcgcacggcgcccgaaacgccgcccatgagcgccggcaggcggctgaactggtcggcgcggtcgtcgagccagtaggcccacgcggcgtccgcggtggagaagccctcccgctcgagatccacgccgtccccggtgatcgtgcagcgcgccatcgcgtttgaaaccgcctcgcgcaggtcggcctgcatctcctcgaacgccgaaaaggcaaaccggcggtagctgtcgagcgggtcgcgcccggcgacgacctcgaggtggatgccgcgccgcttgtcctccatcgcggcgagatagtccgaccagcagcgcgtcaaaaaataaagcgtgagctgccgctcggccttttccacggcggcctctccgtgcgcggcgcagagcgcgcggtgcagcgcgggcgcatggcggcgcaccagcgccggagcctgcccgccgcagagcagcgctttgcggtatgccgaaaccatcgcccggcgctcctcgagcaccgccgcgtaccgctccaaaatgtagcgcgtttccgtatcctgccgctccgcctcgcgctgctgccggcgcagcgcccgcgcgccgtctccgccttccggcgcggccagataaaaccggctgccgcccgggtcgccctgccgccccgcacgcccgcggagctggtcgtcgagccggcggctccggttcagcgcggtgccgagcaccagcaggccgcccgccgcacgcacggcctgctccgccgcgccgtccgccccgccgaggcggatatccacgccgcgcccggccatgttcgtcgaaatcgtgatgcgcccgggccgccccgcctgcgcgatgacggccgcctcccgcgcgtcctcccgcgcgttgagcacgctgtggtcgagcccctcggccgaaagccgcgcggaaagcgcctccgattcccgcacgctgcccgtgccgaccagtaccggcctgccgcgcgcgttttccgcccggagccggcgcagcagcgcgccgtcccggctctgcgcgtcgggaaatacggcgtccggctcatcctgccggatgcacggccggtgcggcggaaccgcgcagaccgaaaggccgtacagccgccgaaacgcctgcgccgccgaggccgccgtgcctgtcatgccgcacaaaaaacggtagcgcagcaaaaacgcgcgcatgtacgtcatgttgtaaatcaccgtctgcggcgcgggctcgatgcgctccatgcgctccatgcgctccaccgcccgctgcagcgcgtcgggaaaccgcctgcccgcggcgcagcggcccgtcggcgcatcgatgatctcgatcttcccgccccgcacaatatagtctctgccgtttttaaggaggaaatgcgcctcaagcgcggcgagcaccgccgaaagcagcgtttcattttcccgcgcgtacagatccgcgccagccagcgcctgcgcggcgtcgatgccggcatccgtcagccagacccggtgcgtttcggcgtcgctttccactgcccccgcgggcaaagccgagacgattgcctcggcgcgctctgaagcctccgcgccgccgggggcttcgccggccagcacgagcgggatgcgcgccgcgtcgatcaagagggagtcggcttcgtcggcgatcgccgctgcaaacggattttccgtcagcgcctgcggttccatacacaggaaattgcgcagctcgtcgtatgcggcctccttcgccgcgatgtagaggacatcgctccgatacgcggcgcgccgtgccgccggcccggttttctccgtgacgcatgacgcggtcaggccgcagcgcgcaaaaaccggcgtgccgagcgcgcagtcgcgcgccgcgagataatcgttgaacgcgagcacatgcaccggcgtgccccgaagcgcgagcgcggccgcggtcaaaacggcacagagtgtcttgccctccccggtcggcagctcggcgatcttcccctgctgcatcgcaaatgccgccgcaagctgcgtttcaaacagcgttttcccggtctcccgccggatcatttcccgcagagcggcgtaaaggcggacgtcgtcctcccgcgcggccgcctcctccgccatgcggcgcaggcgcacgtcgggcagcgccgcacagccttccgcacaaacagcgcggacaaaatccgcgtacggcaaaaagggctcccgccggaagccccgtttttttcgcatatttttcattgtaaacaccgccgggcgcgcgctttacgctgcccggcctgtgattttccgctcacagttcttcctttccgaacgattttttccgccgcaggcggataaaacgaaattcggaaaatcttactctctcttgcgcaccgcgtgcaccgcccgcaggtagagcgcagcagacggccgcagaaccgccgccgcagcagccgcgcaggcagccagcaggacgaaaagcgcggcgcgccggaaaaaaagcccgaaaagcgccgcaaacaggcagaacatcccgcccagcacgcgcacaagccatttttccattttcgccgcctcccttcacgcgtattctctgcctaataccatatactatagcgcagccgccggcatttttcaaccgttttgcgccggaatgtgaatttttcgatcgccgcagaataattattcactttttcctcaattttccgcgccccgctgcgacaaaattcgcctatacgctccgtaatattccgcgccgcgcgcaggttgacataagccgcgcctgagttttcccacacaccctgttgataactctgtggaaagtgttgaaaacccgctttccatatggaatgcgatttccacagcttttcacatgcgcttattttatgtaaacgcgcagcaaaaaagcgccgcgttccgtgcgtttttttccgcctcccgtctgtaaaccgtttgtaaaattttccgcaaaacactagtgggattcaaaattcctccaccaatatcttgtgtttttttcaaaaaaagcgttttatttcccgtggggaatcaattttaaaaaacgcccctcccgcgcacgggcggaccgcggtgtattttcacgctgtgaattgcggaaaagcggttgtatttttcacctgaatcgtgtaaaatggagaaaagcccgcggaaaaccgcctgtttttttgtccgcttttgggttttcccctgtgcttctgtcgaaaaaaaggtggtgcaggggcggaaaagcccccgcacaattttccggataaaaattcattttatacatcgaaaggatgatctcccatgcgtgaggatatttgctcgatcccgatcagtgaaattttcgagccgaaggacggctgcccgttctgccggatgcgcgacatgctggaggaccgcatggcgacctacatcaccggcgccgccatgatggagcccgacgtgcgcgtggagacgaaccgcctcggcttctgcaaagaccattttgagatgattctccagcgcggcagccggctttcggtcgcgctgattctcgaaagccttttggaggagaccggaaacgacatcttcccgaacgaatcgaaaacgccgctcaaaaaggtgctcgcggccgccgaccgccgccggcattcctgcttcgtctgcgacagcctcgagacgaacatgcgccatctgagcgagacggtcatcaagctctggcagaacgagccggagttccgcgacctgtacgccgcgcagacgcacatctgccttgcgcattacagcttcattctcgccgcggcgcagaaaatgccgaagaaaaatttcgtcccgttcgcggcggagacgaagcgcctttcgaaaaactacctcgataccgtgaaggccgacacaacgcatttctgccgtatgttcgactaccgcaacaaggacggcgactggggcaattcccgcgacgcaatcgagcgcgcgatcacctacgtgacgggccgcgtcccaagcgtgacgaccaaaaccgagggcaagaaccgatgatccgctttgtgccgccggacggctgcctcgacctcgcgcagacgctcgactgcgggcaggccttccgctggcaggaaatcgccgcgcccggcggcagcgcatggcacggcacggcctttgggcacacgctgaccgtgcagaaaagggacggcgcttttttcttcgactgcacgcaggcggaattcgacgcggtctggttcccctacttcgatttcggcaccgactacgcggcgatacgccgtgcgctctgcgatctgcacccggttctgcgcgacgccgcggcctttgcgccgggcatccgcatcctgcggcaggagccgtgggaggcgctgtgctcgttcatcatttcccagaacaacaacatcccgcgcatcaaggggattttagagcggctctgcacgctgctcggcacggagattccgggcgggcgcgcatttccgacggccgagcgcctttccgcctgcaccgcggagacgcttgcgcccgtgcgcgcgggctttcgcgcgaagtatctgatcgacgccgcccgccgcgtctcctccggcgcgctcgacctcgagcgcgtgcgcacgctgccgctcgacgaagcgcgcagcgccctgcaaacggtgctcggcgtcggcccgaaggtcgcggactgcgcgctgctctacggcctgcaccgcaccgaatgcttcccgctcgacgtgtggatgaagcgcgccatggcgctgctgcccggcgtttccccgcaggatttcggcgaaaacgccggcgtcgcccagcagtatattttccactacgcccgcatgcaccccgagttgttccgcgccgaggccgccgtctcctgacggccccaccggcgcgaccgtgcgccgttttttccggcgcttcgcataaacaagaggaaggacaggatctccctgcccttcctcttgtttttttcccgttcattccacctcccgcagaagctcctcggctgaaatgccgaacagcctcgcgagcgcgagcaggttggatgtgctcggctcggaagtgccggattcccattttgaaacagcctgccggctgacgcctacggtctccgcgacaaattcctgcgtcatcttgcaggccgttcggcgggcgcggatcgtttcaccgagcgaccgcttgaccgccgcggcctcgctgcgcgcgggctccgagcggatatatttccgaagcgcgcggatcacgagcaccagcagccacacgaacagccccataaacaaaattccgaccgccatgaccgcaaacaatgagatgcctgacatttttccacctcctttcgccttcagtataccatggccgcgcggttgcctccaccaacctccgcgcaaaagcgggttgcctttcggttgcggccggacgcctcgcaccgaccgggcattccgtcaccattggtcgtactgcggcgccggaagcccctccgggatcggcgcggtcacctgcagaatgagccgcgccatctcctccggcgcctccgcgcagccgtacaggagccactggcgcaccacggcgaaaaagcccgccttgacaaacgaaaaaatatactccatctggtgctccgattccatgccgagctgccggaaatacggcttaaagaccgtttcaaacagcgtctggtagcctttttctacgcccgccatgcccacgctcgaaaaatacgcgcggtaaaaaacggcgttgcgccgcacgtggcgcagaataacgaccagatattcccccgaaaagaagtagggcgagcggatctccgcccgctcgatctcctccatgaccgccttgcccgccgcatggctcatcgtctccagcaggtcgtacacatccctgtaatgcaggtagaacgacgagcggttgatgccgacatgcgcgcagatctcctgcaccgtgatcttgtccggctcccgctcagacagcgccgaaagaaaatattccctgatttttcggtccatctcctgaaatcgcaggttgtttttctggttcacggcagctcctttccgcacaataacgcaacaccgacgtgttaattgacggttgagcgcccgtgctttccgtgttatgctctaattaaagcaatatttgttgttttaatcataccaccggcacaccgaaaacacaacagaaaggaacggatcgtatgaaaacagccgaattttttgaaaagggctccgtgtggagggccatcctgcggatgagcatccccaccatcgccgtgatgctcgtcaccatcgcctacaacatggcggacctgattttcgtcgggcagaccggagatgccgcgcaggtggcggcggtctcgctggcttcgccctttttcctgctccagatgacgctcggcacgctgatcggcggcggtggctgcacggcggtttccgcggcgctcggcgcccgaaacacggcccgcgccaaggtctgctccggcgcgtgcgttgtgctgagccttgcgggcggcgtgctgctcggcggcgccgcgctcctgttttcggacgcctttctccgcttcttcggtgcggacggcaccaccctgcagttcacaaaggactacctgctcgtgctcgccgccggcacgccggccgtcgtgttttccagcgccttcgcaaacctcgtgcgtgccgagggcgccgtcaaggaagccgtgctgttcaacgggctcggcaccgccgccaacatcgcgctcgacccgctctttatctccggactcagcatgggcgtgcggggcgccgccgttgcgacggtcatcggcaatctgctctccgccgccgcgattctcctctacctgcgccgcagaagcacggcgctcacgctgaacccgcggcatgcgttccgggataagggaatattcctgcaggtgctggggctcggcgtgcccggctcggtcggcaacctcctgatgagcatgaccaacacggtcgcaaaccacatcgcgatccggtacggcgcaggcgtcgtcgccgcaatgggcgtcggcggaaaggccggcatgatcgtctccatggccgcgatggcgttctgcctcggcgtacagccgatgatcgcctacaaccacggcgcgggcaacgcggcgcgcacacgggagatcgtcaggaaaacagggctgctcgccgttctcaccggcacggcgctgaccgcgctgtgctacgcgctgcgcatgccgatcgcccggctgttcgtgcaggacgaggccgttctcgccttgagcgcgcgcatcatgacgatcggccttgtcggcatgccgctgctcggcctgtactatctcggcgtgaattacctgcaatccgttgggcacgccgcgctcgccacggcgctctccgttttccggcagggactcttttacgcgccggcccttctctccatgcaccgcctgctcggcatggagggcatgttttgggcctcgccggtcacagacgtcgtctccgtttttctcgcgctgtttttcatgctttttccggccatgcaaaagcaccgggccagaaaacagcccggtgcccgtaatccgatttgaaaacgcctcagccccgcattcggaaatacgcgccggagtacggcgcaagctcgagcgcaaacccgcccgcctgcggcttcagcggcttttccgcgcgcggcgtctttccgccgtaaacgtcccagtcgctgtcgatcagcgcctcgagcgccgttatgccgggcagctccagcacataatcctgcacgcggtcggaaaaattgaacacagcggcgatgcgctctccgccgccggcgcgctccagcgcatagacgcatttttcctcctgatggcagtcgatccagcgaaaacccgcggggtcgaaatccgccgcccagagcgccgggtgctcgagatagagccggttcaggtcgcgcagcatgcggtgaaacgcatcgtggttcgggtattgcagcagcagccagtcctgctcgcgcttttcgtcccattcgcggagctggccgagctcgccgcccatgaagttcagctttttgcccgggtgcgcgtacatgtacaggtagagcgcgcggccctgcgggaattttcccgcgtaatcgccgtgcattttttgcaggacagtcgccttgccgtgcacgttctcgtcgtgcgagagcggcagcaggtagcggtcgctgtagtagtacagcatcgaaaacgtcagcttgtgatacgcctcgccgcggtattcgggcgcggtgcggaaataattgagcgtgtcgttcatccagcccatgtcccacttatagtcgaagccgaggccgcccgcctccgccggcgccgtaaccccgggatacgcggtggaatcctccgcgcagagcaacgccgcggggtggcgcagcttgagcccgcggttcatcccgcgcaggaaatcgaccgccgcgccgttcacaccgcgggccgggtcgccctgccagtagatcatgcggctgatcgcatccatgcgcaggccgtccatgtggaactcctcgagccagtaattcgccgccgactgcaaaaagctgcgcacctcgccgcgcgagtgcatgaaattgcggctgccccactcgctgtaccccacgtccgtgtgcggatattcgtagagcgcggtgccgtcgtaatttgcgagcgcgtagccgtccaccgcgaaatgcacgggcacgaagtcgaggagcacgccgatcccggtccggtggcactggtccacgaggtatttcaggtcgtccatcgtgccgtagcgcgcggtcgggctgaaaaagccggtggtttggtagccccacgattcgtcgcacgggtgctcggcaagcggcatcagctcgatgtaattgtagccctgccgctttacatagggcacgagctgcgccgcaagctcccggtaggtgtaccagtcgtccggcgcctcgccgggctttttgaacgagccggcatgcacctcgtagatgttgagcggccccgctttgcagtcggtccgcgcgcgcatccagtcaccgtcgccgaagcggtagccgccgagggcgcggacgaccgaggccgtgcccggccgcagctccatgccgaagccgtagggatcacagcggtcggtaaacgacgcctctcccgtataaatgcggtacttgtacatcgtgcccggcacggcgctctcagcacggcattcccagaaattcccgtctcccgttcgcgccatcggcagctcctgccagtcatggctcgaggcgatcagcgaaacgcgccttgcggcgggcgcaaaggtgcggaacaccgtgccgcccgcccccgcatgcgcgccgagatatttgtatgcgtcgaacgccctgcccgtgtagaaatccaaaaactccatgcgcccgcctcccaaaagataatagacacccgttgtttttctttgtataatgatcttagcacagcggggttccgctgtccaccgacgcaaacggaaatccggcgtttaaccgacgctttccgaaaaacgtcggttaaacgggaaaggacgtatggagcatggacatccgaatcaaaaaaaccgagcgcgcaatccgcgaggcgttcctcgcgctgcgggcgcagaagccgcttgaaaaaatcacggtcaaggagctgtgcgcggcggcatacatcaataaatcgaccttttacgcgcattacgccgaccttttcgcgctttcggacgcgctcgagcgcgaggccgtggacgcgatcctgcgcgacatcggcgcggcgggcacgtatacgctcgacacgccggagaccttcacgcgcgcgctgtgcatctcctttcacgcgcacctgccgcggatcaacctgctgttttcggataaggcgcagagccgtctggccgaccgcatcgaggacggcgtgaaggcgctggtcttctcggcctaccccgagcgccgggacgacccggtgatgcagatcgtgctctcctacagcatccacggcgcatactgggcgtacacgaaaaatcaggcggcgggcgaggccgtgctgctcgaggtgatcgggcgcatttccggcgcgctgcgcgccctgtactgaccgcgcggcgcagagcccccgacagatatttacattctgtttatggactttaaaccggtttctatctatacttataataaaagaacgaaaaatgaaaatacagggggaaacggccttgtgtgcttttgtgcagtttgaggacgtgacgaaaatctataagaccggcgacgtcgaggtcaaggcgctttcgggcgcgagcttcgagattcaaaagggcgaattctgcgtgatcgtcggcgaatcgggcgcgggcaagacgacactgctgaacattttgggcggcatggatacgctgacgaccggccgcgtccggatggacggcgtggagatcagcagtttcgaccgcacgaagctcgagaactaccgccggttcgacatcggctttgtctttcagttttacaacctgatcccgaacctgaccgcgctcgagaacgtggagatcgcggcgcagctctgcccggatcccgtccctgccgacgagatgctccgggccgtgggcctcgggcaccgcatgaacaacttccccgcccagctttcgggcggcgagcagcagcgcgtctcgatcgcgcgggcgctcgcgaagcggccgaagctgctcctgtgcgacgagccgaccggcgcgctcgactacgaaaccggcaaatccatcttaaagctcttgcaggatacctgccggcgcgacggcatgaccgtcgtcatcatcacgcacaacgccgcgctctccgccatggcggaccggatcgtccgcgtcaaaaacggcacgatccattccatgcgcatgaacgcacacatcacgcccgtcgaggaaatcgaatggtaaccgcacgctgcgtataaggacttgattttatgacgaaaacattttggaaaaatatccggcgcagcgtgaccggcagcctcgggcgctacctcgcgattttactgatcattttgcttggcgtcgcgtttctgaccggcctgcggctcacccgccccgtaatgaccgtgacggcggaaaaatacatagacgacgccgcgctctacgacctgcgcctgctctcgacgatcggctttgacagcgcggacgtcgaggcggtctccgccgtcagcggtgtaacggccgccgagggcgcggccaacacggactttatttcgctgcgcggagacgaggaacacatctaccgcgcgcacatgctgacggattcgatcaaccggccggtgctcacggcaggcagcatgcccacacgcggggacgagtgcctcgccgacgcggggcgcttcaccgaggacatgatcggccagaagatcacggtttccgaaaccggcgaggacgacatcctcgcctaccgggaatacacgatcacgggcctcgcccgctcgcccctctacatcagcattgagcgcggcacctcttcgctgggcagcggcagcctcgaggcctttgtgctgatcccgcccgagggcttcgacaccgagtatttcacggagctttatgtgaaatgcagcggtgactttgaactctacagcgacgaatacgaggattttgtcgattccgtttcggacgctgtggaaaacagcgccgccgcttccgtggagacacgctttgacgacctaaaggccgacggcgaggacgagatcgccgacgccgagcagacgctcgccgacgaaaaggcctcggcgcaggccgagctggacgacgccaaggccaagctggacgacgcggcgcaggagctcgcggaaggcgaggcggagcttcaggacgcaaaagcccagctcgacgacgcggccgcgcagctcaacgacggcgccgcgcagctgcagccgagctttacctcgtgggaaagcgcgctaaacgcgggctgggcgcagtattacgacggccaaagccagctcggcagcgccgtcgccgcggggcggcagacgctggaggaaagccgtgcgcagctcgacgaggccgaggcagcgtaccagaccggcaaggccgagtatgacaccggcaaggcgcagtacgacggctacgccgcgtcttgggcggacggctgggcgcagtacagcgccgcgctcgacacctacaatacgaactatgatgcctacacggcgggcttgcagcagtacgaaacggcccgcgccgaatttgaagccgtgaaggacacgctgccgcccgaaacggccgccgaaaccgaagcgcagcttgaggcgacgcgcgccgcgctcgagcagaccgccgccgcgcttgaagccggcaaagcacagctcgaccacaacggtgcaatgctcgaggccgaaaaggaggagctcgacgccgcgggcgcagagctggaagccgccgaagcggagctttccgccgcgcgcgccgagctcgacgcgggctgggcgcagtacaacagcggcgccgaggaactcgaacgccagcaggccgagcagcaggcgcagctcgacgcggcctacagcgccctcacccagcttgaaagcggcatcgacgcgtattggagcggccttgccgaatatgaggacggcgtgcagacgctcgcggacggccgcgccgagtacgaggacggcctgcgcgaatacgaggacgggctcgcggaatttgaagccgaaattgccgacgctgaggcggagatcgccgacgccaaggccgagctttccgacctcgaggcgccggagctcttcgtgctcacacgcgagacgaacaccggctacgtcacctttgagagcgattcccagatcgtcgaaaagctctccgcgctcttcccggtctttttcttcctgatcgccgcgctcgtctgctccacgacgatgacccgcatggtcgacgacgaacggacgcagatcggcacgctgcgcgcgctgggctacagccgcgccgccgtctatacaaaatatatgctgtatgccggcagcgccgccacgctcggctgcctgatcggctatttcggcggcggctggctcttcccctacgtcatctggatcgcctacggcatgctgtaccagatccccggctttgtgagcctttacgaccccgcgctgtttctcatcgctctgctcgcctcgctcctgtgctcggcgggcgtgaccttcctcgcctgccgccacgagatgacgagcacgccggccagcctgatccgcccgaaggcgccggagccgggcaagcgcattctgctcgagcgcttcacgccgctctggaagcggctgaaattcctgcacaaggtctccctgcgcaatatcttccgctttaaaaagcgcatgattatgatgattctcggcatcgcgggctgcacggcgctcgtgctcaccggcttcggcatccacgattccgtcgcgaatatcgcaaactaccagttcgacgacatccagaaatacgacctttccgtcacgtttgccgatccgctgaccgaggcggataccgaggcgctcgaaaagacctacagcgccgagatggaaacggacgccgccgcactgatggcggccggcgagctgaccgggcgtgacgcggcaaagtccgtctacctcgtcgcgtccgacgacccggccatcaccgagatcatcgacctgcaccgcggcggcgaaacggtgccgtatcccggcgcgggcgagatcgtcatcaccgaaaagctcgccgagctagccggcgtgcgcgtcggcgacaccgtgacggtctctgtctccgacaccgacaaggccgagctcaaggtcgccggcctcgccgaaaactatgtgcagaactacgtttacatgaccggcgaaacgtacggcgcagcattttcggacggcttcgagccgaaaacactgctgctccgcacggcggagggcgcggacgaatacagcctttcggccgcgctctcaaacgaggacggcgtggcctcggtctccgtgatttccgacacccgccgcatgatcgacaacatgatgcagagcctcaattacgtcgtagcgctcgtgctggcctcggccggcgcgctcgcgttcgtcgtactctttaacctcggcaacatcaacatttcggagcgcgtgcgcgagatcgcgacgatcaaggtactgggcttccacgccggggaaaccggcgcctacgtgttccgcgaaaacgtcctgctctccttgatgggcatcgccgctgggctgccgctcggcattctgctgcacgctttcgtcatggagcagatcaaggtcgatatggtctcgttcaaatacgtgatcgcgccggtcagctaccttttgaccgtgctgctcgtcctgctgttcacggtcgtgacagacatcatcatgcgccgcaagatcgcccgcatcgacatggccgaatcgctgaaatcgatcgaataatccaaaaaagcaagagcgccctgccgcctgaaatggctcagcagggcgctctttttgtgtttcgcgcagggttggctttccgattgaaccgccgtttcaagaatattcatccgccttttttctgcgccgcaccagcgccgcaaggcaaaaggccgccgcgaggatgaacccggcgccgccgagcacgcccgtcaaatccgggccaataaaggcattcggctcgcgccccataaataaggtggaggccgtatacaggccgattccattcagcgccgcatgaaacaatactacaggccagaccgaccgcaccttaaaaaacaggaacccggcgatcgtaccgataacaacgcagaacacgatcattgcagctatcccgagcagcgggtgctcctccccgtagttgtagccggtcgcaacgatcggcgcgtgccagattccccagattacaccggtcaaaaccgcggctgcggccgggctgtaacgcgtgcccagcttgggcagaagataaccgcgccacgcaaattcctctccgaaacactgcgcaagccccatgagcggattcacaatcaccgcaagcggcagtatttgcagcgcctcgaggtacgcttccatcgtaaaagcgcccgcgctcgccgcatacttcgaatggagcggtgcgaaatcgccggggaaaacgagaaaatacagcgccgcgccgccataagccaagaggggcggggcaaaccacgccagaatgtaccattttatactgcccttaaaatgcggctttaagaacaaatccttccagccctcgcgcgtgaggagcctcgtcagcaccgcactgaccgcaggcgtaaacatgcagactgtaagccaaagcccgctgcgcgtctgccagtacaaaacgctcacggccgctaaaaaaatcgccgtcagcgtgccaaacacagccaatctcttttttactgctgtttccatcttcttcatctcctttattttgacgctcagggcaggatctccgaaaggattgtgttggaaacgaggaagccctctgcggtcagggcgatccgctcatggtccgctagaacgaggcttttcggcagccatgcagccgcgcggcgcaccgcctcgtactgcgcgtcaccgtctgcaaaccgcttgatgcaggcctttcggcgcaggccctcggtcagacgcagggcaagcatcgcgtattccggaaacgcgccgcccgggccgtcgtccaccggcgcgccgccggcgagaaagcccgcgagatcgcgcggaaaataaaaccgccgtccatcgacgaacgagtgcgccgccgggccaagcccgaggtactccccgcagcgccaatactgtaagttgtggcggctttcacggccggggcgcgcaaaattgctgatctcgtactggtcgtagccgagcgccttcaggcggtccaccgcaaaaaggtactggtccgccgcgccgtcctcgtcgggcagaccgagcgtttccgcctgcgccgcaaaggccgtgcccggctcaatcttcaaaatgtaggccgaaacgtggtcggcgccgagcgcggcgcagaaatcgaccgaacgccccagcagcccgcaattcgagtgcggcagggcgagcatcaggtccaccgagatattcccgatgccggcctcccgcgccgcctgtgccgcgcggcgcaccgtctccgcatcgtgccggcggccgagcacgcgcagctcgtccgcgtttgcagactgcatgcccatcgagatccggttgaagccgccggcggcaagcgttttgaaaaattccggatccacgtcgcccgggttgcattccgccgtgatctccccatccgcgcgcacgcaaaacgacgcccgcacggcgtcgagcacacggcacaggcgctgcgcgccgaaaacgctcggcgtgccgccgccgaaatagaccgtgccgacctcggggtgcccgtatttttccccataggaaaaaagccgtgcgcagacggctttttcatactgctccagcgcgctttccccccgcggctgtgcggagtagaaatcgcagtaggggcatttggatttgcaaaatgggatgtggatgtaaatcgaaagcatacttcctccataaaatcgctgcgggccacacgggagcagccgaagaacgcgcccaccgcgctgatttcctccaaagacgagattgcgcatgcaagcgaccacgcggacatccgccgcgggccgtgcccgccgttattcgtcgagcttgaggacggccatgaacgcctcctgcggcacctcgaccgtgccgagctggcgcatgcgcttcttgccctccttctgcttttcaagcagcttctttttgcgcgtgatgtcgccgccgtagcacttcgcgagcacatccttgcgcatggccttgactgtctcgcgcgcgatgatcttgccgccgatacaggcctgcaccggcacctcgaagagctggcgcggaatcttttccttgagcttttccaccatcttgcgcgctctggggtacgccttgtcggcgtggatgatgaacgacagcgcgtcgaccacctcgccgttgagcatgatgtcgagcttgacaaggctgctcttctcgtagcccaaaagctcgtaatcaaacgacgcgtagccgcgcgtgcgggatttcagcgcgtcgaaaaaatcgtagacgatctcgttgagcggcagctcgtagtgaatgtccacgcggtcggtgtcgaggtacttcatgtccttgaacacgccgcggcgctcctgacagagctccatgatgttgccgacaaactcggtcggcgagtaaatatgcgcgtttgtgatcggctcctccgcgagctggatcagcgcggggtccgggtaattcgtcgggttgtcgatcgagagcaccgtgccgtccgtctttgtgatatggtagacgacgcttggcgcggtcgtgatgaggtcgagattgtactcgcgctcgaggcgctcctgaatgatctccatgtgcagaagccccagaaagccgcagcggaagccgaagccgagcgccacggaggtttccggctcaaacgtgagcgaggcgtcgttgagctgcaatttctcgagcgcgtcgcgcaggtcgctgtaatgcgcgccgtccgccggataaatgccgcagaacaccatcggctgcaccgcgcggtagcccggcagcgcttctttcgcggggttatccgcgcgcgtgatcgtatcgccgacgcgcgcttcgcgcacattcttgatcgaggccgtaatgtagcccacctctcccgcggaaaggcagcccgccggctcgagcgaggaggcgcgcagatagccgcactccacgaccgaaaactcgctgccgaccgccatcatgcggatcgtgtctcccgggtgcacgctgccctccttgatgcgcacataggcgataacgcccttgtacgcgtcgtagtaggagtcgaagatcagcgcctgcagcggcgcgtccgggtcaccctcgggcgcgggaatatccgcgacgatcttctccatgaccgccttgatattcacgcccgttttggcgctgatgcgcggcgcatcctctgcggggatgccgatgacgtcctcgatctccgccgccacgcggtccggatccgcggagatcaagtcgatcttattgagcaccggcacgatctcgaggccggcgtccaccgcgaggtaggtattcgcgagcgtctgcgcctcgatgccctgcgaagcgtctacgacgagcaccgcgccctcgcacgccgcgagcgaccgcgagacctcgtagttgaaatcgacgtgcccgggtgtatcgatcaggttgaacgtatagtcctcgccgtcgtcggcacggtacacgagcgtgacggcatgcgccttgatcgtgatgccgcgctcgcgctcgagatccatgttgtcgagcagctgctcctccatgtcgcgcagggcaacggtctgcgtctgctcgagaatgcggtcggcaagcgtactcttgccgtggtcaatatgtgcaatgatgctgaaattccggattttgctctgttccaatgtccttcatcctctgcatggataattttcaaattgatactgtttagtatagcatttacacgcagtttgcgcaagataaaagtccgtgcggggattgcgccgccgccccaaaacgtgtacaataaaatcaagcgggcacggcccgcggcggatgtccgcggagacgcttgcttgcgcaagctcgtttttagaggaaatcggcgcggggggcgcgttcttcgggcactcccggcgggcgtggcctgcggcggacgtcctcggggtcgcttgtctgcacaggctcgtttagctatggacgcagccccggatagcgcgctctccagacactcccgagatgctccgggcgggctgtttcttatcaattttgttggaaaggggatttttatgcctagatttttcacggccgccgtacagttcgacgcggcggcaggcaccggctgcgccgtactcgacggggaggacggccggcacattgcccgcgcgctgcgcatgcggccgggcgagcgcgtgacgctctgcgacggcgcgggcttcgactacgacggcgagatcgaatcgatcgcgggcgacagcgtcgcggtgcgcatcacgggcaaacgcaaaaacgaaagcgagcccgcgctgcgcgtcgcgctttaccccggcctgccgaaagccgacaagctcgagcttgtggcgcagaaggcgaccgagctcggcgtttcggaaatctgccctgtactgaccgcgcgcagcgtctcccggccggacgcaaaggccgcggcaaaaaagcaggagcgcctgcagcgcatcgtgctggaggccgccaagcagagcggccgcggcgccgtgcccgcggtctccgcgctcgcggatttccgcacggccgtgcaaaacgcgaaaggcgcgaaaatcttattctacgagggcggcggcgcgccgctttccgtctgcctgcccgcgggcgagcgcgaggtctcggtctttatcggccccgagggcggctttgacgcggaggaggtcgagttcgcaagggcgcacggcgccgtgacggcgacgctcggcccgcgcatcctgcgcacggaaaccgcgccgctcgcggcgctcgccattttgatgtttatgacggggaacatggcatgaaaacagcattgatcacaggcgcctccggcgagatcggcgcggccatcgcccggcattttgccggcgcgggctacggcgtcgccgcacacggcgcaaagcacttcgaggcggcgcaggcgcttgccgcatcgcttcgggagagcgggcgcaccgccgtcgccgtgcagggcgacctttccgacccggaaacctgcgcgcgcgttttttcggaaagcgaggccgcgctcggccccatcgacgtgctcgtcaacggcgcgggcatgtcgctcgtcgattttttcgacgcggtttcgcccgccgactggagcgcgctcgtcggcacgaacctttcctccgccgtctggctctcgcagtgtgcggcgcggtcgatgatccgccgcaaggcgggcgcgatcgtcaatatctcctcgatctggggcgtttcgggtgcggcgatggaggtcgcgtactccgccgtcaaggccggcatgctcggcatgacgcgggcgctggcgctcgagctcgcaccctccggcatcacggtgaacgccgtcgcccccggctacatcgacacaaaaatgaacgcgcacctttccgatgcggacaaggcggctctctgcgccgagatcccgctcggccgcgcgggcacgcctttcgaggtcgccgccgccgcgcgctttctcgccgaaagcccgtacatcacgggggaaacgctcgtcgtctccggcggctggcgctgacgcatattccgcgcgctttcgcaaaggctatatccataaacgaaccggcgcggcttcacgcggcggagagaaaggatgaaagcagatggacctcaaccagttggacagcgcggcgcgcagcttttttgaaacgctcaccccggccatgaaggaatcgatcatgcagtcgggcgcgagcctgacgacgaaaaacgacctcgagcgctttttgcagaacagccttgcagacgccaagaacgtgcaggtcagcctcgagtgacagccgccgcttcggcggcctacatataaggcgcttcgtgtgaaaaatacgttttcacacacgatttgtgcctttgctcgacgagcaaatttgccgcggcgagcaaagcggcaatcggcttcgccggccggcacaaaaaataaggaatggtaatttttatggaactgtgtaagcccgaagaggcgcgcgcctacgccctcggcgtgtgcgacgccttctgcgaaatcgtcggcgcgggcgtgaagcgcattgcgctgagccaccctttcacacaggcggagctggaaaccgtgctcggcgctgattttatccgcgactgcgcggccattgcggcgcgctacggctgcgctgcgcaccaccagcgggagccgctgctcaccgaccttttccccgtttcgctgaaccgagggaagcagaacgtcgttttttaccgggactcggcggatctcgcggaactgctcgccatcgaggccgataagcgcgcgctgcttatcgccggcgcgtatacgggcgcggcgcgccgggaaattgccgtgcgcttcgggcgcctgctctcctacagcgcgcaggccatcgaccgcctgatcgcccagaatacggagcgcgaatagcggcctgcgcctttcggcgcggcggcccaacccacacagaaaggaatccccctatgaaaccgcaaagactgaaagaaaatttcacgatcggcatattttcctcctcctcgccgatttccgcgacagtgccggtccgctatgcgcgcggcgtgcgctatttggaatcgaagggcctgcgggtcgtgcacgggcagctccgcggcaaggcggacggctaccgctccggcacgattctggcgcgcgccgaggaattcaaccggctcttatacaacgaggacgttcaggtgctgatggccgccatcggcgggaacaacacgaactccattctgccgtacatcgactacgaatacctgaaggcacacccgaaggtcatcgtcggctattccgataccacggcgctgctcctcgcggtctacgcgaaaacggggctgatccccttttacggcccggcggcggcctcctccttcggcgagcttcccccgtatgtggacagcaccttcgagagctttatcaccctcctgcgcggcgatttccccctcccctacgactacgagatgccgccggtctggacggatgaattcatcgactggagccggcaggaccgcgccaaagccccgcaggaaaacgcgtggcgctgcgtgcggcccggcgtgtgcagcgggcggctgatcggcggcaacctgaatacgatggagggctttttcggcaccgaatacatgccggaaatccgggacggcgacatcctgtttctcgaggactcgctcaaggacgcctgcaccgtcgagcgctccttctcccttttgaaactctccggcgtgctcgaacgcgccggcggcattctcctcggcaagcacgagaaattcgacgacaacggaaccggccggcagccctatgagattctgctcgaggtacttggcggcacggagctgccgattctcgcggattttgactgctgccacacgcaccccatgctgaccctgccgatcggctgccgcgtgacgctcgacgccacaaacaaaaggctttccctgctggaatccccgtttgaagagccgaactgaaccggccaaaggcacagattacataccccaaaggagttttccccatgtccatgacgatcaacaaggcgctgccggacccggcggcgctcaaatcccagtttccgcttcccgaaaaaatccggcagatcaaggccgcgcgcgacgcggagatcgcggcggtgttccgcggcgaatccgataaatttctcgtgattgtcggcccctgctcggccgacaacgaggacgccgtgtgcgaatatgccgggcggctcgcgcgcgtcagcgagcgggtgaaggaccggctgattctgatcccgcgcatttacacgaacaagccccgcacgaccggcgagggctacaagggcatgctgcaccagcccgccccggacaaggcgcccgacctgctcggcggcatcatcgcgatccgcaagatgcacatgcgcgccatcgaggaaacgggcctgacctgcgccgacgagatgctgtaccccgaaaaccgcagctatctcgacgacctgctctcctacgaggcgatcggcgcgcgctcggtggaaaaccagcagcaccgcctgaccgcgagcggcatggacatcccggtcggcatgaagaacccgacggccggcgacctctccgtaatgatgaactcgatccgcgccgcgcagaccgcgcacaacttcatctaccgcggctgcgacgtgacgacggacggcaacccgctcgcccacgcgattctgcgcggcggcgtggataagtacggcacgaatatcccgaactaccactttgaggatctgacccgcctgtgcgcgctgtacgcggagagcgggctttcaaacccggcctgcattgtggacgccaaccactcgaactccggcaagaaattccgcgagcaggtccgcatcgtcagcgaggtgctccacagccgcgcccacaacgacggcgtgcgcgcgctcgtcaagggcgtgatggtcgagagctacctcgtcgagggcgcgcagaagatcagcgaccacatggtgcgcggccagtcgatcaccgacccgtgcctcggctgggacgacaccgagcggctgctgctcgcgatcgccgatcgcgtgtgagcgtgccgcgcagagaacggagggaactcttatgaagctatacgtcacgcgccacggcgaaacgccgatgaacgccgcgcaccgcgtctgcggcagaaccgaccttgatttgaccgaaaagggcgtgcagcaggccgttgaggccggcaagagccttgcgggctgcggcatccggcggatcatcgcctcgccgatgcgccgcgcccagcacacggcggcgctgatcgcccgcgaaatcggcgtggagaagattgagaccgagccgcggctgatcgagcaggattacggcatctatgaaaacaccgactgggacggcgaggccttcaaccgaaataagcgccagtttgccgtgcgctacccgggcggcgaatcgatgctcgacctcgccggccggctgtacccgatgcttgacgagctcaaggcgcagggcggcgagccgacgctgctcgtgtgccacggcggaatctgccgcatgatccgcacgtattttctcgacgtgccgaacgaggactacgccgcgttcaagatggcgaactgcggcgttctggaatttgacctgtaaacgcatccggaagggaggcatccgccatgcagtacattttaaacggagggctgacccccgcgcagccgcctgaaaccggcacgccctacgtggaggtgctgacacgcaatgacttcgacgcgcggtacggcgacctcgtgcaggattccctgctcacgcgcagcatggagcacgagcagcactgcaaggccgacctgtaccggcggtacgtgctcggcacgctgcatgtgccggataagaaggagctgcgccggcgcgcgtgggactgcggcttttatctggatcaggagcgcctgctgctcgtcagcgacggccccgagctcgagacgctgctccacgccatcgacgggcggcagatcaccgccctgcgcacgccggcgcaggcgcttttcgagctgctcgaggcgatgatccgcggcgacgaggattttacggacgcctttgaggacgagctcgagcgccgcgaggcggatatgaacgacagcgtgcacgccgttccgcccgacctcgaccgttatctgatgcgcgcgcggcgcgaactgatggtgctcggccgcttttacaagcagctttcgcaggtcggcgaccgccttgccgaatgcacgaacgggctgatcgagcgggaatcgctcgacctcttccgccttttttcccaccgcgccgaacgcctgcacgccgatgcggccgcgctgcgcgaatacgcgctgcaaatcctcgacctgtaccagtcgcggatcaacgtgcggcagaaccggatcatccagattctgacgatcctctccgcgattttcatgccgctgacgctgatcgccggctggtacggcatgaatttctccggcatgccggagctgcgcatgccgcacggctacctcgcggtttcgcttctcgccgccgcagtcgttgcggccgagctgatcgtctttaagcgcaagaagtggatgtgatccgccgcgccggctttttcccgtaaccgaggatcttaaaataaaaatgagaattatttttatttttagcttgctttttccagcgcgttggtatataatagattcaacaggccgggcggcgtataacaccgcccaaaaacggaaagaatatacgcagaaagcaaggaggaaatcggcatgaaagatttaaagggcacaaagaccgaagcaaacctgatggctgcctttgcgggtgagtcgcaggccagaaacaagtacacctactatgcctcgaaggcgaagaaggacggctacgagcagatcgccgagctcttcaccgagaccgcgaacaacgagaaggagcacgcgaagatctggttcaagctgctgcacgacggcaatgtgccggacacgatcgcgaacctgaaagacgccgccgaaggcgaaaactacgagtggaccgacatgtacaagagctttgccgaggacgcaaaggccgagggcttcgaccacatcgcattcctgttcgagcaggtcgcgctgattgagaaggagcacgaggagcgctacagaaagctgctcgcgaacatcgaggaaggcatcgtattctcgagagacggcgacatggtctggatctgcagaaactgcggccacatccacgtcggcaagaacgcgccggaggtctgtccggtctgcgcgcacccgaagtcctatttcgagctccgcgaaaagaattactgatctaaaaagagaggcccgcacgcgggtctcttttcttgtgccgaaagccggccggcatcaccgcccacggggacatgcggcacgctcaggctgtggggcgggcgatcacgggcaatcccgcaccgcgcgcgggccatggactttccgcacgcactgtggtaaaatagaggcatcacagagaagcggagaaatacatatgtccgactggaatccgaaacagtacctgaaattcgaggcgcagcgcacgcagccctccctcgaccttgcgatgcgcctgcgccggtacgccccgaaaagcatactggacctcggctgcggccccggcaacagcaccgccgttctgcgcgaggtctttcccgacgccgcgctctgcggactcgacagctcgcagaatatgatcgacaaagcccgtgccgcccatccggcgctttcgttccgcctcggcgacgtgcaggccctcgagggcacctacgacctgctcttttcgaacgcctgcctgcaatggctgcccgaccaccgccgcctgctcccgcacctgatgcacagcctgaacgacggcggcgtgctcgcggtgcagatcccgatgaacccggacgagccgctgttccgcatcatccggcagaccgccgccgaccccaagtgggaactcaaaaacgtctttttcgaggtcaacgagacgctcgaaagccgcgattatttcgacatcctcgcgggctgcgcgagcgatttcgagatctgggagaccgtctaccaccaccgtatgccctcgcacgcggcgctgctcgactgggtgcgcagcacgcgcctgcgcccgtatctcgacgcgttggacgaagcggccggcgcgcagttcgaggcagagatcctcgaggccgcgaagcgcgcgtacccagtcatgcagaacggggaaatcgatttccgcttccgccgctttttcttcatcgccgtcaaataaggccaaaggccgtgcggcggggtttccccgtgccgcacggcctttttgttttatttacgcgccgagcgtcgtatgcgcggcattgtgctcgcgccggatacagcggtcgagccatttgaaccgggcatagtagacgataaaaacgagcgccgtcaccacccaggttgccgggtaattcatcgcgatcatctccatcgtcggccacaggggcaccgcgatcaaaagccacagaatgcgcaggccgcacacgccgaagcaggtgatcagcatcggctgcagcgcctcgcccgcgccgcggatggcgcccgaaaagatctcgatgaaaacaaatgtgaagtaggagggcgcgaggatcaggaagaagttcgcgccgatgcgtacgacctcgtcgtcgccggtgaaaaagcgcaggagcggctcgcggaacacgaacagcagcgcgctgagcgcgatcgtcgtgccgagcgccatcaaaagcccgacccgcgtgcagcgcttgacgcggtcgtaccggcgcgcgccgaagttctgcccgacgaatgtcgtgaccgagatgccgaacgcattcatgaccatccagataaagccgtcgatcttgccgatcgccgcccaagccgcgattgcatccgtgccgaaaccgttgatgctggcctgaatgaagatattcgagaacgagtacatgacggactgcaggcccgccggcaggccgatgcggatcacgttgcgcaggatacccgcgtcaaaacggatcttgcgcagctccacgcggtaggattcgtgtgtcagcatcaggcgcgccatgatgagcaccgcgctgatcacctgcgaaagcaccgtggcaaacgctacgccgaacaccgcccagtgaaacacgacgacgaacagcaggtcgagtacgacgttcgcaaggcagcagacgatcagaacataaagcggcatgcgcgaatcgccgatcgcgcgcagaataccggtgccgacgttatagatcatattcgcgatgatgcccgcataatagacgttcatgtaaagcagcgcgtcgtcgaggatctccgcgggcacgctcatcgcaacgagcaccgggcgcgcggaaacgaagccaagcaccatgacgatgacgccgcccacaatggcgagcgccatcgaggtgtggacggatttcgagatgttctcgcggtcgttcgcgccgaagaactgcgagacaatgaccgtagcgcccgaggaaacgccgacgaagaagccgaccagcaggttgatgaccgtgccggtcgtgccgaccgccgcgagcgcctgcttgccgacatactggccgacgacgaccgtatcgaccgtattgtaaagctgctggaaaaaggtgccgatcaaaatcgggaagaagaacagcaggagctgcttccagatcacaccatccacaatcgaattttccgttttccgcatacaaacccgctcctcttccgcaccaaaattcaaagcccgccgcgaaacctgcgcttttgcggcatatcgcggcttattttaacacacccgccgctgtttttcaaccgcccgcaggccggatggctgaaaaattcaggaaaaatttctgcggccttccctgcgcggcgctctgctaaaaagcaaaaagcggcgggtctccccgccgcttcggccagccgtgccgccggccctttatctgctgtgcttttttctgccgtacaggacgatgcccagcgcagccgcggacagcgccgaaaggccgagccacgccgcatagggcgtcgtgtcgccggtctgcggcccgtcaacggcaggcttctccgtcggtgcgggcgtcgtctccggcgccggggttacactcggcgccggtgtggcctcaggcgccggggttacgctcggcgcaggtgtggcctccggatccggcgctgcgctcggcgcgggcgtaccttcgggcttcggcgtcggctgctgctccgccgcgccgcagactgtgcagtggccgtcctcataccggtgcgccgtcagcgggatcgccgcaccagtctccaacagcgtgccgcagactgcgcagaccgtatccccggtgtagccctccgccgtgcaggtagcgggccgcgcgtttttcaccgtctcggtatggccgagcgcggccgtctccgcgtctctgtaggtgtcgccgcagcgcgtgcaggtgtgggtggtgaagcccttttccgtgcaggtcggcgcagtgacctccgccttgtacgcgtgcccgagcttttccaccacggtatccgcgagcgcaatctcctttgccgcgttttcatcggcaaacagcttgccgcataccgtgcacgtccaataggcggtgtggccgtctgtctcgcaggcggcgtccttcgcctccaccgcagtcagcaaatgctcatgcggctggagctttatgtaagcgctctgcgaaaacagcgcatcggtaatatccgcctccgcgaccagcgaggcgttttcgcggctgtcgcccgcatatacctccgcgccgcttcctgcatagttcagcacgggcggaatcgggaacgcaccgcccgcggctgtgacctccaccgtgctgttctcaaccgccattgtatctccgtgtgcctcaatgcctgtctgcgctgaatggacgcgcacatctgcaccgttttcaatcgaaatattgcccgcgcgggagaaaaggccgtactttccgcacggcgcttccgtacctgcgcggacggtgccgccgtcgatttcgatatcgcctgtcatggtgccgatgccgacatagccgttcaccgtcagttctcccgtgacacgaacgtcacagatggaaggcagatccgaaagccctacggaaatcgccgccgtacccgttttggaagctttcacttctgccgtaccgtcaatcacgaccgagccataaaaggaattgatgccgccgttcgagccgaacgcatacaggtacgctgaatcgagcacctcgacgccttctccgccgttgacggccataaagccgtctgtgcgcacatcgacctgcgccgtatcttggatgatgaccttttggtccgcctcgattgtgctgaccacctgaaccgcagagtttccggagatcgtgacgctgccggtgtcgctgctcattgcaggctgcgagccggtggcttggatcacggcgttgtgcaccgtgagatctttttcaatattcaacgcataggcaccattgtacagcttgagcgttgtgccgtcaatcgtgcacgcaccgttttggttgagaacgcactccgttgttgcctttatttccagactgccgccatacagcgagaggtcgccggccgtttgtacctgaatgcccgtaccgccctctatgctgttgtcgccgatcagcgtgatcgctgtaccgccgggcacatacagcgccgcctgaatctgcgcatccttcagcgtaagccgcacgccgttgtcgtctagctcgcagtagaggttgtaatcctcggtatcctgtgtcttcgtcaccgtgcggccgtctgcctcgagcttataataactgccggatttaaactgcacaccgccggccgttgacgaaccgatgccgaggtttgggatattcgtcccgatatccgccgccggcataatctcgtcctccgcgcgcagcgcggccgcggcctcagaaagcgccgcatagcgcgagcgatcgagctgcgcgcgttgttcctccgtgagcgcctgctccgccgcatcgacagccgccagcgcttcggcagccgccccggcctcttccgccgtgagcgcatccgccgcaggcagcgcgtcgatcagcgcctgcacggcacacacggtgcagtcctccgccgcgccgtgcacgcagagcacaggctccgtttcgggtacggaatcctgttccgcttcgcattcggcacagacaaacgcgcagggcgcgccggcactttcggcagtctccgccgcatacccgcacgacgctgtatgcgctgtatggtgcgggcagaggccatcggcctcctgcgcgagcgccgccgtcggaatcatagtacaaagcagaacggcggcaagcaggaccgcgagagccctgccggttcttgttccttccatttcagcatcctccattttctttcagacgcgcaaaaaccatattctgcctgatatgtcagaccttttcgttcaccgtgtttttgcgtgcctttgatctatttacagccgttttaggctataaatactgttttaatctatcatacagcatccgagcgaaaaagtctaccttttcattcctgaaattccggatttcttgacaaaaaaggaagcgcccgaaagcgcttccccgcaaaaactcattcgatcaccgtcaccgggtattttttctccacgggcttcggctccgccgccgcgtagccgagcgccgccatgccgtacaccatgtggctcttcggcacgccgagctccgtcaaaaccgcgcgcacgccgggatcatcgcacgtatccgtgccctgattgatccacaccgaggcgacgcccagcgaatgcgccgcaagaaagatattttcgagtgcgcaggcgttgtcccacgtcttgatcagccccgtctcgttcgaggggatgatgagcgccgccgggcggtacaggttgtagctttcgctgccgagcgcgctgcccatcgcggccgcgagcttttggatcttctccgggttcagcaccgcggaaaaatgccacgtctggcggttcatcgcgctgggcgcgtgcaccgcgcactggaggatcgcatcgatcttctcgcgctccacgggtctttcctgaaatgcgcgcacactgcggcgcgtcaggatgttctgaatcacttcgttcgtcataccttttcctcccagataaattttttataagcagctccggcgtttaaagtttttccgccagaagttccgccattttttccgcaagcgcacgctccctttcagtgaagcggttttggaccgggctgtcgagatcgatcaccgcgcggacagcgccgtccttgacaaccggcacaacaagctccgagcggctcgcactgtcgcaggcaatatgtcccgggaacgcgtgaacatccggcacaagctgcgctttcccggcttcacaggccgcgccgcagacgccgcggccgcgggcgatgcgcacgcacgccggctttccctgaaacgggccgagcagcaggctgccgtccggctgcaccgtatagaagcccgcccagttgacgcggtcgagcgtttcaaacagaagcgccgcaagattcgccatgcacggcacgggctccggctcgtccgcaaggagagatgcggcctgtgccgccgcctctccgtattttttatcggcgcgcgcttccaccgccgccttcggctcgagcagcaaaacggaatacgtatggctgaaccggtagccgagctgctgtgcgagccgcaggctctcccggttcgccgcatcccacgaggggtacagccctttttcgaggcagccgagaatcagcttcgccgcgcaggcgcgggccagatggcgccggcggtgcgcctcatgggtcgtgatctgcacctcgatgccgccgtcaaacgccgaataagcggacgcgccgcagacgatctccccgtccttcagcgcgaacacgccgagcgcaagctcggaaaacgacgcgtaatcggcaaaattcgagatgaaatcgcgcatccagccgcccttctcccgaatctgcgcccagatctccggcgtcatgcccgagagcgcgtagcccgccgggagatcctcggcgaatcggtgcaggcgcgcaggatcaaacgcgccggtttccttgcgcgtcgcataccgcaagccgatttccgcctcaccgacgagcgaccggcagagcgcaaactgcgcctcatccggcgcgacgaggatcagcgcgtgatcggtgcgcgcctgcacatcgtcgagcagtgcctgcacggccgcttcatcctgcccgggcgaggccaaaaacgcgaagtcgccgagcaccgcgcaggccgccgtcatcgccctgttcgcgtagatttcgcccatcgtgccgtcgagcgcggaccagacgatcgtctcatcccagccgtcgaacaggggaagcgcctcggacggctcctctaatctgaaaatatcagaattcatcttttatactccttgtaaacaggcggttgatcgcctcgtttggacatccgtttttatacagtacgttgtaaacagcgcggcaaatcggcagatcggcgccgacggttttgcccagccgcagcagggcgtccaccgcgtagtagccctccgccagctcgctgtacggctcgcgcttcacgaacttttcgccgaacatgcggttgtgcgaatatggggaaaacagcgtcgcctcgtagtcgccgaggtggcacaggccgtaggctgaaagctcgttgccgccgagcgcgtcgatcagccgggcgatctcgcgcgtgccgcgcgccatcagcgcgcccttgagcgtcgagagaccgaggccgtcgagcataccggccgcgatgccgatgacgtttttcgccgccgcgccgatctcgctgccgatcaggtcctgcccgtagtaaaagcggatcagctcgctcgagaacgcatcgaccagcatgtgcttcgcgtcctcgtcggcgctgtcgatcaccatgcagttcggcacgccggccgcaaactcctgcacgtggccgggtccgacccacaccgccacgcggtttgaagcgtcgcagcccgcggcgcagacctcggagagccgcatgccggtttcgatctcgacgcctttcatgcacagcacaaagattttatcccgcagcccgagcggcgcgagctcgcgcatcaggccgcggagcccctgcgaattgaccgaaatgatgatgacgtcgctttccgccgcgcccgaaagcgaggtggtcagcgcgagcgaagcgggcatttcgacgagcccgttcgaccgggtttcgagcagcgcctgcatccgcgcggagcctgcgcgcccgtaaagagatacgctgtggccgattttatcgaggtaccatgcgatgaaagaaccccagcggccgcagccgatcacggtaattttcatatggagtgaattgcctttccggcggccataagcgccgcctttttatatcccgccgcaaaaacacggcgctttgaagccctagaaggcgcgccctcgggctatttgtccctgaaaagcccggcgctgtccttcgcgtagatcacgccggagacgacggcaagcagcgcggcaacgcccatcagcgcaaagccgatccaataaaacacggcctgcactgtctcgatagccgggagcgcaacgagaccgagcgcatccagctcgagcacgtactgcaagaggaagatcacgcagattgcggcgatctgcgaaacagttttcgccttgccccagttgttcgccgggatcaccttgccgttttccaccgcgatcaggcggatggaggtgacggcgaactcgcgcaccatgatgagcagtacgaaccacacgtttgtaaagccggtcgccacgaagcagacgagcgccgacatgaccatgatcttgtcggcgagcgggtccatcagcttgccgaagtttgtgatcagattgtcgcggcgggcgatcttgccgtcgaggtggtcggtataggacgccgcgccgaagatcagcccggcgatcagaagatggtgcgggatgaaatccgccagcgtgaaaaatacgaagaacggcacgagtgccatgcgcagcatcgtcagcttattcggtagattcatttcaacgcccttccccgctcagacgcgcgtgccaaacaggtcgcagtcgaccgcctcgtcgatgtgcacggtcacgagctcgccgaaatacggcttcttctccgccgtgaaaaacaccttgccgtcgatgtccggcgcatccatcgcgctgcggccgaaccagcactcggcgtagcggtcgaagccctctgtcagcacctcaaggtcgcggcccacctgcttttcgccgaggcggtccatgatgttcatctgcgaatccatgatgagctcggcgcggtggttcttgacctcctcgtcgatctggccgggcagctcggccgccggggtgtcctcctcctgtgagtaggcgaagcagccgaggcgctcaaactgcacctccttcacgaactcggcgagctcggtgaagtccgcttcggtctcgcccgggaagccggtgatcagcgtcgtgcgcagcgtgacgcccgggatcttctcccggatcttccgcatcagcgccgtgaggctctcgcggtcgccgcggcggttcatcgccttcagaatcctgcccgaggcgtgctgcagcggcaggtcgatgtatttgacgatcttttcctcttcggcaatcgtgtcgagcagctcgtcggtgatcgcgtccgggtagcagtacagcacacggatccaatgcagcttctcgattctgcacaggcggcgcagcagctttgcgagcgaatactcgccgtacaggtcgagcccgtagcgcgtcgtatcctgcgcgatgaggatcagctccttcgcgccgttttcgaccagcgcgagcgcctcctcctcgatgctctccatcgtgcggctgcggtagccgccgcggatcagcgggatcgcgcagtaggtgcagcggttgtcgcagccctcggcgatcttgagatacgcgaagtagctcggcgtcgaaagctcacggccgccgcacagcggcatcttttccttttccggaaagcgctgtgtgaagccctccagcacgctttcaatgcaggcggcgatgtcgccgttcgcgccgataccgaacacgccgtccacctcgggcagctccttgtggatctcctcgcggtagcgctccgcgagacatcccgtgacgacgagcttcttgatgcggccctccttcttgagcgtcgcaagctcgaggatctcgtcgatcgattcctgcttcgcgctctcgatgaagccgcaggtgttgacaaccgcaacatcggcgagcgccgcgtcgtcgcacagttcaaagcccgcatttttgaggctcgccatcagcatttcgccgtccacctgattttttgcgcagcccaagctgaccattcccaccttgattgccatatgtaaaaagtcctttcctcttgttttcagccgtattttctttttattttaacagaaaacagacggcttttcaatcgaaatgccgtctgttcacaaaaaacgtacaaatagaagcgccgtgcggcggagcggttcagccggcaggccagccgaattcgctgtacggcacgcccgcgcggaaatttttgagcgccgcgcgccggtcggcgagcagcgtctccggcagcgcgtccagcgggaaccaccggagctccgcgcacttttccggctcgcagatctgcggcttcgcttcgccgcagtccgcgcagaaaaacacgttcacataggtcgtaccgtccggcgaggtcttatgcgtaagcgttgcaaaccgcacgtcggcaggagagaacgccagcccaagctcctcggccgcttcgcgggccatggcggcccgcatcgtttcgcccgcctccacatggccggcggcgccgcagtcccacatgccgtccgcatagccggtgttccgccttttctgcagcaaaatttcctgccttccgtttcgctcccgcagcagaagcagcatcaccgcgctcgccgttttataccgctcgcgcatggtttcaccctcctttagcgctctgccaaaaatccctccggccgaagccaaagggatctttgttattcctccggaggctccgcgtttaaaacgctgaagatctcctcgaagccgtagccgtagcgctgcaaagcggcgacggcccggcggcgtgtcttttcgtccacccacgcggcggggtacttccgctccaaaatcgcgcggatgttttcctccgtttcatcgcggcctgtggaaaactcttcgagaaccgcctcgatcacatcgtccgcgatacccttttggcgcagctcctgcttcacgcggcgcgcgccgaagtgcttgtggttgaagagcgactgcgcaaggcggcgcgcatagtcctcgtcgtcgatcagcccgagcgcctccatgtgatccgccgcgcggcgcgcagcctcgcggtcaaactcggcgcgggcgatcttatccgtcagctcctttttggagtgcgcgcggtgttcgagcaggtagagcgccttttcgcgggcgcggtgctcggcggaggcctgcaaaagcgcgtgcagcgcctcatcgtcgagcgcgtcgccgataatcaggccgctgcgctcgagtgtctcggtgtcaaccttcacggccgcctcgccgtcgatgtagagctgcgaaagccggcggcggcgcggctggatatcggtgatgatcattcgtcgtcatcgacggtgatgtcgatgtcggccttcacctttttggaatcgacgggcttctcctcgggcgcctcgaccggcgttgcggccgccttgccctcgcccttcgccgccttcaaatagagcttatcggcattctgcttgacctgcccggtaatctcctcaaaaatatcggggttatcctgcaaaaacttcttcgcattttcgcggccctgcccgatgcgcgtgccgttataggagaaccacgcgccgctcttctgcacgatgtcgagcttttcggcgaggtcgagcagctcgccgacgcgcgagatgccttgcccgtacatgatgtcgaactccacctcgcggaacggcggagccaccttgttcttcacgaccttgaccttcgtgtgcgagccgatgatgtccgtgccgttcttgatgacctccttcttacgcacgtcgatgcgcacggaggaatagaacttcagcgcgcggccgcccggcgtgacctccgggttgccgtacacaacgccgaccttctcgcgcagctggttgatgaagatcgcgacgcagttcgatttcgagatcgcgcccgcgagctttctgagcgcctgcgacatcaggcgcgcctgcaggccgacgtggctgtcgcccatttcgccctcgatctcggcgcgcggcacgagcgcggcgacggagtcgacgacgataacgtcgatcgcgtttgagcgcacgagcgcctcagtaatctcgagcgcctgctcgccggtatccggctgggagacgagcaaagaatccacgtcgacgccgagcgcggaggcgtacacggggtcgagcgcgtgctcgacgtcgatgaacgcggcgttgccgcccatcttctgcccctctgcgacgcagtggagcgcgagcgtcgttttaccggaggattccggcccgtagatctcgacgattctgccgcgcggcaggccgccgatgccgagcgcgaggtcgagcgaaagcgagccggtcggaatcgactccacctgcagcgtgttgttctggccgaggcgcatgacggcgccctcgccgaactgcttcttgatctgcgtcagcgcggtttccagcgccttgagcttatcctcgggcttaattttatcgttgccctttaccttttcagagaccttgccgtttttatcgcttgccatctttataaccacttacctttctctgcgcatacccgctcttctcgaaggcggctctgcgacaggcgcaaatccggagggccaacgcgccggatccttcccccgcctgcccgaaaagcgccccggaaattccagtttcgatgcctctattatactaaacctgccgcaaaaaagcaatgcttttccgaacgtattttctatttttttagatttttatcgtgagcgcggcggtgcgcggttcgatggatatgccgtttccacatgctgccgaccccggcatcctgcggcgtcgcccgaacgtaatgccgcttcatccccgtatttcagcattgatcgctcaaaagcctgcggggcgccgcccggaaaacgagcggcgccctgcggtaaagggagaaatattcggaatttacagcccgagcagggcggttgcggcggccttcatcttttcgatgatcgcctcggactcctcgcgcgtcttgcccttgccggaaagatagatcttgattttcggctcggtgccggacgggcggacgatcagcttgctgccgttctccagacggtactcgagcacattggacttcggcagcgtgatctccgttttcacgccgccgtcggtgcggacggagagcttgtagtcgctgcggccgatcacgctgcagccggcgacctcctgcggcgggttcatgcgcaggccgtccatgatggcgttcatctgcttcatgccgtcctcgccctcgaaggtgaaattgcacaggtcgttcttgtaatagccgtacttctcgtacaggccgttgatcgcatcgaccagcgtcatgcccttttccttgtagaaggaggccatttcgcagatcagcatgctgccgttgacggcgtctttatcgcggacataaccgccggagaggtaaccgtagctctcctcgaagccgagcaggtagcgctcgggatggccctcggcctccaaaagcgcgatctggtcgccgatgtacttgaagccggtaagcacgcggcggatctcgatgccgtaatccttcgcgatgctgtcgaccatgtcggtggagacgatggtcgtgacggcgaccgggtccttcggcaggttgccgcgctccgtcttgcactgggcgatgaagttcagaagcaaaatgccgacctcgttgccggtcatcagatggtattcgccgttctggttgacggcgatgcccacgcggtcgcagtccgggtcggttgcgagcagcaggtcgggcttcacggtctcgcagagctcgaggcccttctgcagcgcctcgcggatctccgggtttggatacgggcaggtcgggaagttgccgtccggctcgctctgctcgggaacgaccgtgacgtccttcacgccgatcttgtcgagaatgcgcagcacgcacatcttgccgctgccgttcagcggcgtgtagacgagcttgaggttatccgccggcttgccgaggatgctctcgttgtagacgtccgcgatgaacgcgctgacggtttcctcgccgatgtattcgatcttgcccgccgcgagcgcgtcctcgaacgggatctttttcacgtctgcaaaaatatcgagcgcctcgatggccgccatgatgccgtcggccatgccctcggtgacctgacagccgtcgctgccgtaggccttatagccgttgtacttcgccgggttgtggctcgccgtgacgcagatgcccgcatcgcacttcaggtggcgcaccgcataggaaagcgccggcgtcggcataagctgcgggtaaaggtacgccttgatgccgtttgccgcgagcaccgccgcggattccttcgcaaacagcacgcccttgttgcggctgtcgtgcgcgatggcgacggaaagctccttgcccttgccggtctgaatcaggtaatttgcaagaccctgcgtcgcttttctgacggtgtagacgttcatgcggttcgtgccggcgccgatcacgccgcgcaggccgcccgtaccaaactccagatttctatagaagcggtcgttgatttcctccggcttatccttgacggaaagcagctcctcggtgagatctttatcgtcgagctcaacgctcagccatctctcgtattcggtcatattcttcgtccttccatgatattattttcacatgtgtcgtcgccgcccctgcgggatactgtgctaaacaccgcggcttttgtccgcaaaaggcagaaaatgcgcatgcaaaggtctatagaataagattaccattttcgatgtacaatgtcaatgatgaattctgcaaaaaccggtcagtttctgtatataatgtttgtcaggatgcctgcctcggaaatatccacgagcgcgcacgacgcgcggtagcccgaggccgagccggggttcagaatgtacaggccgtcgtcgtacatttcgagcggctggtgcgtgtgcccgaacaaaagcagccccgccttgcgcgcccgcgccgcacataccgcgcggtacaggtcgctttttacattgtagttgtgcccgtgcgtgcagaaaatgcgcgcgccgccgaggtcgagcaccagctcgtcgggcaggtcggcgccgaaatcgcagttgccgcgcacgctgtaaaacgcggtttcggggtaaagtacgcgcattgcctcaatatcgcgcgcgccgtcgcccaaaaagatcaccgcgtccgccgttctgtggcgcgcaatcatctcctgcatatacgcgggatttccgtgagaatccgaaaaaacaaggagtttcatagctgtttcctttcctgcgccgcataaagcggcggctgttttggcatcgaatttcgcctttctgcatattctgtagggagacagactgaaaaggggcgataccattgaatgaaaatcagatgcaggcgcttttgaagctcgccgcccagcggctcaacacaacgccggaggcgctgcgcagcgcggcggaaagcggcaacctgcaaaatatcaccggcggcgcgaacggcccgcaggccgagcagctccgccgcgtgctcagcgacccggaggccgcgaaaaagctgctttccacacccgcggcccaaaagctcttcgaggccttcggcggtcagaaataagacggaaaggagatctgcgccatggatgacatttcctccgcgatccgctccgtgctgaacgacccgcagagcatggcgcagatccagagcatcatgcagtcgctcgggggcgacagcgcggcacagaacccgccgcccgccgcaccggcgcccgctcccgcccaaggcggcgcgggaaacgccctgcagtccctgctgcccgcacttggcggcggcagcgacagcccgatgatgtccatgctgctgcgcgccgcgccgctcatcgcctccgccaatcaggaggacgacgcgacgcggctgctcgcggcgctgcgcccgctgctcggcgaggagcgccgaaaaaagctcgatgcggcgagccgcatcctaaagctcctgcacctgctgccgctgctcagggaaagcggcgttctgcaaaacatcctgtgagaaagggcggggagaacctatgccgaacaacatgccggacgcgcgcgccatcaacgaggcgctgcggcgcgcccgggaaatgcagtcgcgcgccgagcccgccgcgcaggcgccgcccgcacaagaggccgctccagagccggagcccgcacaggcccggcagagcgcgccgcaccctgccccgcccgcatcgggcggcggcgcctcgccgctcgacctgctcttaaaggataaggaacgcacgctgatcctcgcgcttctcattctgctttccggcgagggcggcaacaccgagctgcttttcgcgctgatgtatctgcttatctgacctgcccgtcgccgcggattacatatttgtacgaaacgatctcgttgagccccatcggcccgcgcgcgtgcagcttctgcgtcgagatgccgatctccgcgccgaggcccatctccccgccgtctgtaaagcgcgtggaggcgttcacatacacggccgccgaatcgacacgggccgtgaattcctccgccgcgcggaaatcgcgcgtcacgatacactcgctgtgcccgctcgagtaccgcgcgatgtgcgcgacggcttcatttaaattttcgacgacgcgcaccgcgaggatatagtcgaggtactccgtctcccagtccgcctccgcggcgggaagggcctcgggcagaatctcccgcgtgcggctgtcgccgcgcagctccacctgcttttcccgaaggcgcgccgcgatcgccggcagcgccttttccgcgatcttttcgtggacgaggatcgtctcaatcgcgttgcacaccgacgggcgcgaggtctttgcgttgaaaatgatctccgccgccatatcgacgtcggccgtctcgtcgacgtacacgtggcagttgccgacgcccgtttcgatgaccggcacgcgcgcgttttccacaaccgcgcggatcagcccggcgccgccgcgcgggatcaaaaggtcaagatagccgacgaggcccatcatctcgcggctcgattcgcggcttgtatcgcggacgagctgcacggcctcgcggggcaggccggtgcgcgcaagcgcctcctgcaaaaccgccgtgaccgccgtattcgagtgaagcgcctccttaccgccgcgcagaatcaccgcgctgcccgccatcaggcagagcgccgcggcgtcgctcgtcacgttcgggcgcgcctcaaagatgatgccgatcacgcccatcggcaccgtgattttttcgattttcaggccgttcgggcgcgtttcgccgctcagcacgcggcccaccgggtcgcgctgcgccgccacatcctccacgccctgtgccatcgcttcaacgcgcgccgccgtcagcgtgaggcggtcaagcatcgcgtcgcgcatgccgctctcgcgcgcggcggcgaggtcgagcgcgttcgcctccaagatccgcgccgtctccgcgcgcagcgcctgcgccgcctccagcagtgcgcggcgctttttttcgcccgccgtgcgcagcaccgccgcggcctcttttgcggccgcgcccattttctgaagctccgtcatcttcgatcttctcccttccatttgttctgccggccagcggctgtgtgcagatcacctgcagtcaaacaccgtgccgatatccgcgccctcaaagacgcggtatagattttccgggtcgtcgcccgcaacaattaccgtcggaatatgcgcctcgcccgccacctgcgcggcgcggatcttcgtcgccatgccgccggtgccgcggctcgagcccgcgccgcccgccatcgcgcgcaccgcgtcggtaatctcatggatcaccgggatgcgcttcgcatccgggcaggtcttgggatttttgtcgtacacgccgtcgatgtccgtcaaaatcacgagcgcatccgcgccgaccagcgccgcgacaatcgccgagagcgtgtcgttgtcgccgaaattgcgcccctcgagctcatcgaccgccacggtgtcgttctcgttgacgatcggaataatgcccatcgagagcagctcgcggaacgtgttgacgacgttgcggcggctgttttcccacgcggtcacgtccgccgtgagcagcacctgcgcgacgttctggtggtattcgccgaaaaatttatcgtaaataaacatcagctcgcactggccgaccgccgcaagcgcctgctttttcgccgtgtcatccggccgcttttcgagtccgagcttgccgacgccgacgccgatcgcgcccgacgagacgagcacgatcttccgcccgctgttctgcaaatcgctcagcgcccggcagagctggtcgatgcggcgcaggttgagcttgccgctttcataggtgagcgtcgaggtgccgatcttcacaacgacgacctctgcattctgtaaatccattttttcccctcatttttccattgaaatttcccgcatcagcgctgcgcagtgttctgcaaatccccggcgcatctgcgccgtcataccccaatgccagctctttccgcccggcgcttcggggtgtttgtccgaaaccgtaagcaccgcggcaatctcgacgccgaggtactcggccaccgtgaacagcgccgacgtctccatatcgacgccgaccgcgccgcggcgccgccagagtgcctccttttcataggtctggcggaatacggcatccgttgaaacgaccggcaggcacttcccctccggaaaccaccgccgcaccttttcaagaaacgtgccggacggtgtggaaaacaggcggggctccgcataatgcaggcttgtcccctcctcgataaacgccttgtccggcagaatcctgtctcccacttcagcctgttcggaaaacgccccgcacatgccggcggtgagaacctgccgcacgcccagcgcataaagcgtttccagtgtgtccgccgcctgcggcgcgccgcgcccgccgtcgagaaagcagaccggcgcatcgggcagctgatagaccggcgttcccccaaggaaacggggcagcttctccgtcacgcagaccgccccctgctcaagcagaggcgcgatcacgccgcccatataaaagaggatgcagagcgccggcagcctgtactgttccccggcgctgtgccggctttctatatgctgcgccgccgtaaaaacgggcgccgaccggtcctccctgctataccacatattccccactccttttgtggccattatacaggcttttgccggaaaagaaaaggtttttttgcgcaaaagctgccgcggcgcggtatacggcgcgtttgtccgcgcgtgcggaacaaaagcaaaagcctgtccgcatacaaacgaacaggctttgtttttttatcttctgtcgcgtctcgggcggtccccacgcgggcggtcgctgcgctcgcggcggggcttatcggagagcgtgttctccggcacagcgccgtcgaggtcgatcagcgcgtcgcggcgggagagattcaggcggcccttgtcgtcgatctcgagcaccttgaccttgatgatgtcgccgatgttgacgacgtcggtgacattctcggtgcgcttgatgtcgaggtgggaaacgtgcacaaggccctccttgcccggggcgatctccacaaacgcgccgaagtccatgatgcgggtgacgcggccgctgtaataggagcccggctccgggtcgttgacgatcgtatcgatgatgtccatcgcgcggcggcacttctcgatgtcgatgcccgccacatagcagtggccgtcgtcctcgatgtcgatcgtgacgtcacactcggcgcagatcttttggatgaccttgccgcccgagccgatgacctcgcggatcttgtcgaccggcacgatcgtcgagagcatcttcggcgcatacttcgaaagctcgggacgcggctcggcgataaccggcagcatgatttcgtcgagaatgtagtttctcgccttgtgcgtcttttcaaacgcctccttgatgatctccggcgtgaggcccttgatcttcaagtccatctggatcgcggtgatgcccttcttcgtgccggcgaccttgaagtccatgtcgccgaagaagtcctcaaggccctgaatatcaaccatcgtcatccagcgctcgccctcggtgatgaggccgcaggagatgccggcgaccggcgccttgatcggcacaccggcgtccatcagcgccagcgtagagccgcagaccgagccctgcgaggtggagccgttcgaggagagcacctcggaaacgaggcggatcgtgtacgggaactcctcgaccgacgggatgaccggcagcagcgcgcgctcagccagcgcgccgtggccgatttcgcggcggcccgggcctctcgagggcttcgtctcgccgacggagtaggacgggaagttgtagtggtggatgtagcgcttcgtctcctcctcgtcgatgccgtcgagaagctggttgtcgcgcgtggagccgagcgtcgcgacggtcagaacctgcgtctggccgcgcgtaaacatgccggagccgtgcacgcgcggcagaatgccgacctccgccgcgagcgggcggatctcatccatgcctctgccgtcgacgcgcttctgctcgtcgagcagccagcggcgcacaacatacttctgcacgagatacatgcactcgtcgatcttcgaggtctgctcggggtaaagctcgtcgaaatgcgcgtgcaccttctcgtaaacgggcttgaggcgctcgtcgcgcacggtcttgtcgtcggtatcgagcgcggcgcgcacgtcgtcggccgcgaaatcacggatcgcctcgaacagctccggctccggcttgttcgacgggtaggtgaacttcgccttgccgatctccgcctgaacgcccctgatgaactcgatgatcttctggttttcggcgtggccggccatgatgccgtcgaacatatcctcgtcggaaacctcgttggcgccggcctcgatcatcgcgatgcgctcgctcgtggaagcgaccgtgaccgccatctcggagaccttgcgctgctcggccgtcgggttgatgacgaacttgccgtccacaaggccgacggaaacgccgctgatcgggccgctccacgggatgtccgaaatggaaagcgcgatgctcgtgccgacgagcgccgcaatctccggcgagcagtccgggtcaaccgacatgaccgtgcagacgatcgaaacgtcgttgcgcatgtccttcgggaacagcgggcggatcgggcggtcgatcatgcggcaggtcagggtcgccttctccgagggacggccctcgcgcttcaaaaaggagcccgggatcttgccgaccgagtagagcttttcctcgaaatcgacggaaagcgggaagaagtcgatgccgtcgcgcggcttcgccgaggccgtcgccgcgacgtggacaaccgtttcgccgtagcggacgaggcattcgccgtttgcgagctgcgccatcttgccggtttcgatcttgagcggccggccagcgaactctgtttcaaacactctgaatttttcgaacatagcgtattttcctttcccctaaaaagtcggacgcacgctgccggcaaaccgcttaacaataaaaggagcgcgcagcgcgtgtgcgcttcttttactgctaaccagcctgctggccgcatggtgcagatattataatcggctgcgcgggcccgcgcagccgaaaacagacaaaaattacttgcggataccgagctcagcgatgatggctctgtagcgctcaatgtcgatcttgatgaggtagttgagaaggcttcttctctggccgaccatcttcagaaggccgcggcgggagtggtgatccttcttgttggatctgaggtgctcggtgaggtcgttgatgcgcttcgtcagaacggcgatctgcacctccggggagccggtgtcgccctcatggcgggcatacttcttgatgatttctgtcttttcgctcttcagcattgtgttttccacctttacaaattatttccgcgctcacaggtcggggtcggtaggctccctgcggaatcgcttcccaaagggttggtccctgatccgtgggcgggcactgcattagtatagcacagatatgcagcctttgcaagcaattttttccgaaatccgccttgtcttatattgacagattttgtttttgcgtatagtataaatattatgaatttccgcgccccttttgggcacgcggtcaaagagaaaggattgaactgccatgagccgaattgcagtggttaccgatacaaacagcagcatctccgcagaagaggccaagaagctcggtattttcctgctgcccatgccctttattgtggacggccgtgaatatttcgagggcgtcacctgcacgtatgagcgctttttcgaaatgctcagcggcggggcggacgtttctacctcgcagcccgcgcccgaggcgatcacaggcctgtgggacgagatcctgcggtcgtacgattccatcctgcacatcccgatgtcctccgccttgagcggctcctgcggcacggcgaaggcgctcgccgcggagtataacggccgcgtctgcgtcgtcgataacaagcgcatttccgtttccctgcgcgaatcggttctcgatgcgctcacgctgatcgaaaagggcctgaccgccgcggagatctgcgtgcagctcgaggaaaccgcctacagcgcaagtatttacctcgcggtcaacacgctggagcttttgaaaaagagcggccgcgtgacggcggcgggcgcagcgctcgcaacgctgctcggcctcaagcccgttttgcagattcagggcgaaaagctcgacgccttcgcgaaggtgcgcggcatgcccgccgccgaaaagacgatgctgaaggccgcggaaaaggacctcgccacccgttttgcgggccggcccgtgcgcattctcacggcgtactccggcgacatcaagccggcgctcgaatggcgcaagacggtgcgcaggtatttcgacgacagccgcatcgagctttacaagctgccggtcagcatttcctgccacgtcggcgccggtgtcaaggcgatcgcctgcatcgagcacatcgagtaaaccgcacagaaaaaaagaacagccgcacgcgctttttgctatgcgccctcttatgagagacagtgaaaaaactgccttatacggagggcgtatggcaggcgcagcggctgtttttatttttccttccggcttgctgtgaagattttccgcgcctgtttttcgttgcggcggatctccgccttcagcgcgtcgagatttgcaaatttcttttcgtcgcggatgaacgcgagcagctcgagccggagcgttttgccgtagaggtcgcccgaaaagtccgggatccacgtctcggagagcgcgcggtcggagccgacggtcggcttcacgccgacattcgtcacgccgcagtatgtcctgccgccgatgtgcacgcacgaggcatacacgccgaagcgcggcagaatgaagtgctcgggaaaatgctggttgattgtcggcgtgccgatcgtgcggccgatgcggttgccgtgcacgacctcgaactcaaagccgaagggccgccccagcatggcggcggcgtccgccatctcgccgcgctcgaccgcatcgcggatgcgcgtcgcgctgacccgctcgcccttgtagcacaccgtatcgacgacatgcagcacggcgccgcgctgcgcacaggaacgggcgagccacgccgcgtcgcccgccgcgaatttgccgaagcggaaatccgccccacaggcgaccgcctgcgccgaaaggccgaagcgcaggacgttcagaaagcgctccgccgcccacccggcgatgtcggcgaaatccggcatgatcacagcctcaacgccccattcagcgaagatccgcagccgctcctccatcgtcgtgagatagcggcagccgccgccgagatgctcggcggggttgtcccgaaacgtgaatgcgacgggcgtgaggccgctttccgccgccgcacggaccacggcgcggtggccaatatgcaggccgtcgaacgcgccgagcgccaccgccgtttttccgcagcctaagagctgctctttaattgcttccgtatcgcgaatcacgcgcatggtatacctccgaattgatgcgaatttcccgttccccgcggcttttaaatgctttccgcaaacgccttgacgtagcacagcgcgccgtcccgcagcgcggcgagccccaaaaactgcgcgccgctgtacacggcggtgtgctccccctcgcgcggggcctccccctgcacgcggcagcgggagagctccagcgcgccgccgtttaagtaccgctttccctgcgccggcgtgacctgcacggccggcagcgccgaaaacagcctttcaaccgggcgcagcacgcccgaaaaaccgccggtctcgcgcagcgccttcaaagcgtcgagcgtgacggcgtccccgagcgcaaagccgcaggccgccgtgcgcctaagcgccgtcataacgccgcaggtgccgagtgcgtcggcgatgtcctcgatcaaggtgcggatatacgtgcccttggagcacgtaacggcgagccgccccgcgcgctgtgcctcgtcgtactcgagcaggcgcagcgcggcgatatggacggggcgcgcctcccgctcgatttcaacgccctgccgcgcaagcttgtagaggcgctgcccgttgacggacaccgccgaatacatcggcggcacctgcataatgccgcccgtaaaccgcggcagcaccgcttccagcgccgcccgtcccaccggcgtttcgtccgccgcgagccgcatgccggtcacgtcgccggtatcactgcgctcgccgaagcgaaagcccgcctcatacgctttgtccgtatccggcagcagcgaaacggccttcgtcgcccggccgagcagcagcggcagaacaccggtcgccatcgggtcgagcgtgccggtgtggccgatgcgccgctcgcgcgtcagcccgcgcacaactgcgaccgcgtcgaacgacgtgaaatcctgcggcttgtccagtacaatgatgccgtccatccggcggcctcccttccaaaatcatctctaaatccgatcaggcctgcgccccgagcgcttcgagcgcctcgccgcaggctgcgacgatctgtgccttggccgcatcgagcggcgcgaaaatcgtgcagcccgccgcgcccttgtgtccgccgccgccgaaccgcacgcagatttcagcggcgtttgcgggctccgccgcgcgcagggagatcttatactcattctcgccgcgctcgcggatcgtcagcccgagcagaacgccctccacctgccgcacagtcgccgatacgccgtcgaggtcgctctcctgcgccccggtttcgtcgatcagcttctgcgtcaggcagagcaccgcgcagcgcccgccgtggaaaaactccatgtcgctgtacacgcgcttcaaaagcgcgatcgccgtgcggctcttcgtgtcgaacatcacgcggttgatctccgccgaccgcgcgccgctttcgatcagcgcggccgcgatgcggaaggtctccggcgtggcgttcgcatagcggaagcagcctgtgtcggtcgcgacgcccgtgtacaggcaatccgcgatctcgggcgtgaccgcggcgccgagcgccgggatcagccgccagatcatctggcaggccgcggccgcgccgccctctacccacgcttctttcgcgaaggggcggtgcgtcgcatggtggtcgatcgcgaggtccacccgctcgccgagcggctccagtgcgccgagcagcgttttatccgccacgtcgaccgtgacgatgtgctccggctcgaaatcgccgaacgcgatcccgcggaacatgtagccgaatttctccggtaccgggtcggcgcagcggaactgcaccgattttccgatcgccgtcagcgctcggctgagcgccgaggcgcagccgagcgtgtcgccgtccggcgagcggtgcgagaggatcaaaattctgtcccacgattttaaaagcgacgccgccgtgtttaaatccgccattcgattcaccgtccctttccgtcatttcttctcgaggtcgtgcaggatgcgcgagatgttcgcgctgtattcgatggaatccgtcgccttgaagattatttccggcacgtggcgcagcttgagccgcgcgccaagctcccggcggacgaagcccgccgcgcttttgaggcccttcacagcgttttccgccgcgtccatcccctccatcgcgctgacgtagaccgtgcagtacgacaggtcgttcgtgacctccacgcgcacgacgctcagcatcacgccgctgacgcgcgggtccttgagctcgcgcaggatcgccgagatctcccggcggatatcctccgtggttctgcccagcttgtgacttggcatagtgttttctcctttcacagagggcgctccccgccgccggcccgagggctgtgcggcacggtgaggcccgcttattttttcacaaaatgcgcggcgatgaggtcggccgcgatccgaaggcccgctttgaggctctcggtctcgatccactccccgcgcgtgtgcgctccgccgccgcggcagaggccgaccgtcgcggccgggatgccgagcgaaaacgggatgttgcagtccgtagacatcgcgcagatttccggcgcgacgcccgtatggcgccgcacgctttcggcacagcggcgcagaagctctgcctgccgcgggtcgctcctgtttttttcgccgcaggggcgctcgccgagcagctcggcctccacgccgagcccgtcggcgcggaaagactcgagcacgctttcaaaataccgccgcgcgctaagcaggctgtcccggtcgtcggagcggagctcgtagagcatttcggcctgctgcgcgatcgtgttgaccgacgtgccgcccgaaatctgcccgacattgaacgtcgtgcggctgccgttctgcggcaccgcgtaggcgtaaagcctttcgacgacggcgctcagccgctcgatcgcgttggggctgccgaaattcgagaacgaatggccgcccgcggtgcgcaccgtcacgcggtagcgcagcgagccgacggccgcgccgcacagctcctccatgtagccgtcgaacgacacgacctcccgcagcctgtccccgtagcgcgcgaggagcgcccggctgcccttgagattgccgagcccctcctcgcacgaattcagcgcaaagacgatgccgcacgacgtttccggccgcgcctgtgcgacgtacgccgccgtgagaagcagcagcgcgacgttcgcggtgtcgtcgccgacgccggggcagaacattttgccgtcccgctctgtaagcgccatcggctccgtatcggggaaaacggtgtcggtatgcgccatgaagagcacgatcgcctccgcctgctccgcgcggtacgggtacacggcgttctgggcctcatcgatgaaaacgcccgccgcgccgtgtgcctcaagccacgccttgcaaaatgcggcacgcttttcctctttatggctcggcgcgggaatggcgcagagcgcccgaagcagcgcggccgcctcgccttcattttgctcgatataccgctgaaaatccatgtgcggcgctctcctttccgaaaaaagccgcgccccgcggcagggggcgcggttaaaccgactttcgattcgattattctctgtattcttccatctcgtacgcctcaagcacgtcgcccagcttgatgtcgctgaagcgctcgagcgtgatgccgcagtcgtagccgtccgcaacctctttcacgtcgtccttgaagcggcggagcgacgcgattttgtcgtcggcgacgatgatgccgtcgcgcacgaggcgcacctgcgcgccgcggacgatcttgccggaggtgacgtggccgccgatgaccatgccgacgttcgtgatcttgtagacctcgcggcactcggccttgccgaggaacacctcacggtacttcggcgcgagcatgcccttcatcgcggattcgatctcctcgatgcagtcgtagatgatgcggtacaggcgcatatcgacgccgtcgcgctttgcattttcctccgcgaccggatccgggcggacgttgaagccgacaacaatcgcattcgacgcgttcgcgagcatgacgtcgctctcgttaatcgcgccgaccgcgccatggatcacgtgcacgcgcacctcgtcgttcgtgagcttctcgagcgactggcgcaccgcctcgacggagccctgtacgtcggccttgacgataatcttgagctccttcatctcgccgaccttcatctgctcgaagagattgtcaagcgtgaccttcgtctgcgaattgaacatctcctccttctgctcgttgaggcgctgctcgacgagctcgcgggcgaggcgttcatcggaaacggcgttgaaaatatcgccgccgaccggcacgtcgttgaggccggtgacctccaccggcacggaggggcccgccgacaccacgcgctcgccgcgctcgttcatcatcgcgcggatgcggccgaccgtggtgcccgcaacgacgatgtcgccgacatgcagcgtgccgttctgcacgagcaccgtcgcgaccgggccgcggcccttgtcgaggcgcgcctcaatgaccgtgcccttcgcggcgcggtccgggttcgccttaagctccttcatatcggcggtcaggatgatcatctcgagcaggtcgtcgatgcccatcttcgtgtgcgcggaaaccgggatgcacggcacgtcgccgccccactcctccggcacaagctcgtactcggtaagctgctgcttcacggcgtccgggttcgcggccggcttatccatcttgttgatcgcgacgatgatcgagacgcccgcggccttcgcgtggttgatcgcctcgacggtctgcggcatgatgccgtcgtccgctgcgacgacgagcacggcgatatccgtaacctgcgcgccgcgcgcacgcatcgtggtaaacgcggcatggcccggcgtgtcgaggaacgtgacctcgcggtcgtccacctgcacgcggtacgcgccgatgtgctgcgtgatgcctccggcctcgcccgccgtgacgttcgcatggcggatcgcatcgagaatcgaggtcttgccgtgatcgacgtggcccataacgaccacgaccggcgcacgcggcacgaggttcgcgtcgtcgtcctcgctgtcgtcgatgatccgctcctcgatcgtgacgacgacctccttttccaccttcgcgtggaattcatcggcgatgagcaccgccgtatcgaaatcgatcgtgtcgttgatcgtcgcgaacacgccgttcatcatcagcttcttgatgacctcggcgctcgtggccttgaggcgcagcgcgaactcgccgactgtgatctcctcgggcacggtgatcgtgatgtgcttcgccttgcgctcggccgcgatgcggttcaggcgctcggcctctgtctcacgctttgcgctgcgcggcttgccgcggcgctggctcttctggttgatcttctgcttcgcggcgacggtttcgttcttcaccttgtcgtaggcgaggcggtcgtacttctcgttgtacttgtcgatgttgacattgacggttctcgtatcgacaacacggcgggacggcgcgttggtcacctcgccggaagctgccggcgccgcattctgctgcgggcgcttctgcggctggctgttcgcaccattcttcggcgcgttctgctgcgccgggcggcggtcgtttttctggttctgacccttgccgcgctcgccctgctgcgcggtcttcttatcgcccgcctttgtctgctgctgcggctttttctcctgcggccggccgccctgcttcgccgcgggcctttcctccgccgctgcgggctccgccttcggctgattgcgcgttgcgaaatacgcgtcgaaattttccgccgcgtggtcctgcgtgaacttatcgaacacgatgtcgagctccttttcctccagcgccgtcatgtgctttttcggctccttgacgtacttgccgaggatgtctagcacctccttgttcgccacgttcagatctttcgcgacttcatgcactctgtactttatcatcataatataccatcacctatccttatctgaagcgcaaacggcatcgcgcctctcactttcaccggcagccccaagctcctgcttcagcttccccgcgaacccggcatcgcagacggcgagcacgcccgtctttttgccgatggccgccgagatctgctccatcgtaaacgcggtttcaaaaaacgccgcctttgcgcgctccgcttcaaaccgcacgttcttttttgttttatccgaaaggtccgccgcagcgagcacgagcgggcattcgcccccgcgcagcgcctgtgccgcggtgtcgtacccgtagcgcagttttcccgcgcgccgtgcaaggccgagcagggccagcgctttctgcatgccgaccgcctcccttaccgcttctctgcgtctgcgcagagttccgcgtacatcgcctcgtacacctcgtcgccgatgcggcaggagaacgcgcgctcgatgcgccgcgccttctgcgcttttttcaggcactcgggatcgcggcacacataggcgccgcggcccggctttcggccggtcaggtcgagcgaaacctccccgcccgtctccacgccgtccacttccttcacgggcgcgcgcacgacgcggaccagctcctttttcggcttcatttcgccgcagcccgcacacatccggagcggtattttcttttgcttcaccctttgaatcacgttcctttctgcgcggtgcaaaaccgggcttacgcctcgtcctcgccgaagaagccgctttccggcttgatgtcgatcttccagccggtcagcttcgcggcaaggcgggcgttctggcccttattgccgatcgcgagggagagctggctgtccggcaccgtgaccttgcaggtgcgcgagccgtcctccgcaggctccacggagagcaccgtcgccggcgcgagcgccgcggcgatgaactttcccggatcctcgctgtagtcgacgatatccatcttctcgccgccgagctcgttgacgatatccgtgacgcgcgcgccgcgggtgccgatgcaggcgccgaccgcatcgacgtccggattgtggctcaaaacagcgatcttcgttctggagccggcctcgcgggcgacggccttaatctcgaccgtgccgtcgaaaatttcgggaacctccttttcgaacaggcggcggatcagatcggggtgcgtgcgggagatgatggccttcgggcccttttccgtctccttcacgtccaccacgtagacctgcacaaaatcgccctcgcggacgtcctcggtaccgacctgctcgctcttcggcagaaccgcctcggccttgccgattttgagcgaaagcgcgccggttttcgggtctacgcgctccacaagggcgctgacaagctcctgatggcggctcttgaactcctgcatcatctggccgcgttcgctgtcgcggatgccctgacggatgatgttgcgcgccgtctgcgcggcgacgcggccgaactgcttcgtatcgagccggtggcgcacaaagccgccgatttccgcgcgcgggtcatactgcgcggcgatctcccgcgcgatctcgcagttcgggtcctccacggtctcgacgatctgctttctcagaaaaacgtcgaactggcccttttcggggtccatgtcgatgacgacgtcctcgttgccgtagctgttcttgcaggcggtgacgatcgccttcttgattttatcgatcataaaatcgaccggaatgcccttttccgcctcgagcagcttcagcgcttcaaaaagctccttgccgtcgttgttttcctttttctgaactgcctttctagccatttttccaaatccctgccttcttaaattcttgtcgcttattctgtgtcgtaatcctcgatcaggtggacggccgcgcactcctttttggtaaacgtcacggtcgtctcctcgtcggtgatgatctcaaaatcgccgttctccagcacgtcgatcaaaatgccctcgagctcgcgcacgccgttttccagcgggcggatcagcttcacgtgcaccggcgcctccaaaaacgcctcaaaatgctcggggcgcgtcagcttccggttgatgccgggcgaggaaacctccagcgtgtattcctgcgggatcgggtcctcgctgtcgagcacagggttgacggcgtgcgtcatatcgacgcagtcgtcgatcgaaacgccgcccggcttgtcgatgaagatgcgcaggtaccagtccgcgccctcctttgtaaacgtcacatcccacagcgtgaggcccagctccgccgcgagcggcgccgcgagcgcgcgcacgacgtccgttgtgctgcccctttttttcttttcctcggccatatcgcgccatcctttcccgcggcgccgaccgccccggccgcgccgcttagcgctgctggggagcatctgcccgcaatacaaacaaaagagcgggtcgccccactctttcatcatcctactatctaccataaagaattataccacggtattttgtattttgcaagcccttttaaaaggaaaaggacgcggaaaaccgcgcccttcgtggatttttcgtgctttattcctcgtcctccgcgacaaccggctggttctgtgcgagaaccggcttcgcctcgagaatcttctccacatcggtggaacggacgatgccgctcacctcgccgttcagcgtggcgatatagcggcggtctgcgctcgcatccttgtagaagctgacaacctcttcacggccgtcgaaataggtgtagcggagcgtgagggccggctcgccctgcggctcgcggatctcctcgtttaagacggagacagagaggcacatctggtagaacggctggtagttgtcgtaatcgatctccttgccgtcgagtgtgaccttcgtgatgtcataatacgggctcgtttcggtcgaacgttcctcgtcgagcgtgcgctccacggtgtagacgtccgtaccgtcatcggcctcaaccgacagcttctccacgctcttgatgttcggcaggcggataaatccgtcgcgcatttcgaacacggaggcgttcgcccaagaatcgacgctcgcctcatcgatcagatagatcgtcttgttgtcgtccaccatcaggctgtagatgccctccgtccggtcgccgaggcgcagcgtgtgcttttcattgttgagctcaaactcagcgatggcgctcggctcatcgaggccgtgcttctcgagatcctcttcggtcgcctgcaccgccacgacgccgctcgccgtcacattctgcagctgctcgagcaggctgtcgatgcgcgtggagctcgcgccggcgtagaccggctcggtgatctcatagagcaggagctcgtcgtcggacgtgttgagctggatctcctcgggataattcgtgcccgaaaggtgcaggctctcgagctccggcgtcagcgtcgtctcgttgccttcgtcgtcctcgctcgtcagatccggaatcgcaagcacggccgtgttgacaaagtcgtacttcgatttcgtcagataggtcgagagcggcgcgatgtaaaccgaatcgttgtagagaatgtaccagccgtacgtctcgcccgcttcgctgccgacgagaaccgtatccgtactgccgtccgtataggtgacggtcgcctcataggcaccgctgccgctgaggccatattccgcgagatcctccaccgcgccgagctccttcgtcggcgtgatcgagtagaaggccttggcgagcgtcatcacattggaggtgagcacgtcctcgttctcccagccctccactgtgaaggcgtcgttcgcctcgctgtccgcgctgcttttgatcggcacaagcgtgagcacttcaccgctttcgctgtttttgatcgcaactttctgcacatctgcgatgtccttgtcgatcagcttgtccagcgtctcgctcgaaacggaagaagagctcgattcctccggatcggcggcggggctcgtcagaatcagcgccgctgccgccgcgccgagcacgaccagcacagccagcgcgataatgatattttttgtggttttcttcatggcaggtcctttctgttcgggtgcggcttacaggtgtcttcttctaaggaagatcacgaggccggcggccagaacggcaatcggcacgagcgccgtgaagacaatgaggccgacaaactggatgaccgacgcggaggccgcgatatccctcgtattcgtctgcgtctggctgaccgagatgccgatgcgcgtgtccgacgtgcctgtcagcagcttcacaaaatcggtcgtgaatgccttattgccgaaggtcgagttcgcaatgaaggtggagagcaggctctcggagctgccgtccacaacgatattcgccgtgatcttgccctgattgtccatgtacttctgcgagagggcgacgatcgtgtgcgtgccggtttccggattttcctccgtgccgtcggaatccgcgctcaccgcataggccgtgtcgctcgtctcgacgaccgagtacgtcacgatgtcgttgtttgcggagaacaggcgctcgaccggcgcggagaacggcatgacgacattctcatacgtgtcgctcatgacgtcatccgaaacattcgcaaacagatacggggaggcggagccgtcgcccgtcgtcagcacattgcccgcatcggtttccatcagcacgctgctctgcggcttgaggccccactcctcgaggaacgtggagagattcggcatggaatcccagctcagcgtcgggtacgttgtgaagaacagggtgcgggaggaggccatctcctcgtcgctgataaacgcctcgagctttttgatctcctcggtcgtgtaatccgtcgtcggcgtaccgataaagaccatcgaagcgtcctccggaatctcctcctgcaggatgttgaaggtcttgacctcaaagttattgtcctcgagcagcgccgtgaaggacgagaggttctgttcctcgtccagcatctcgtcgtggcccgttgcaagcgccacaaccggaacggtgtcgaggttgacgaggtacagcgcattcgcgagcgcgccgtctaccttggaataataggtgtattccccggtcgtcgaatcctgctggatgctgaacaggtcggtgaccgaaagcaccttattgcgcttttccgagctgatcatcaccttgccggtcgtcagattgtcgtccggatactggctgatgaacgtcgggttgcggtccgggtcgatgaactcgaccttgatcttgctgttgagctcctgcaggcggtcggccagatttgcgacctggctgtactggaggccgtagttcgtgtagacctcgtcgccgcgcacggcgtcctccgagccgatgatgtagatcgtcgtatcgctttcgatgccctttgcaacgtccacggcctcctcgctcagcgtgttgaggccctcgagcgtcatgtcaaaattcatcgaggggaaacggtccgaaagggccgaaacgaggatgttgacgacgattataatggcgatgaacaccgccgtaaagacgacggccatcgagccgtgcttgaatttatccttgtgcattgcggacttcaccgctgacagattgggtttcttgctcatttctctgctcctcccttagttccagcggcggctttccaccttgcgggcggtcaggaacacgaacaccgcagccacgctgatgaagtacacgcagcttgaaatgctgaaaattccctgcgtgaaggtatcatagcgcgcggtgaacgagatccacgtgatgatcgtgccgatgatgttgcccgaaagcgccgaagcgatctgatcgacaaacatcaggagcacggcgatgacaaaggtgccgatggccgcgatgacctgactgacggtcaagctggagataaagacgccgatggagatcatcgccgcgccgtacagcagcgtgccgatatagttgccgatcagaatgccccacggaaacgcagaggcgaagaggctgatcgtgagcgcgggcaggagtgccagcgtgttcgcgacgaaatagacgccgaacgccgcgagaaatttgccgagcacgatcgaggtgacgctgaccggcgcggtcagaagcgcctgatccgtcttattcttgcgctcgtcgctcatgctgcgcatcgtgatgatcggcataatcatcatgctgaacatgaacatcgtgctaaacacctgaccgatgtaggagctggagccgatcatcatcacctgatagtagaaaaagccgtacagggcgagcagcgccgccacaacgacgtagccgaccggcgaagcgaaatacgccttcagctctcttttgaatatcgctttcatttctccgcttcctccttgttttccgtttcctcaaactccatatcgtcctccgtgatgaccgccgtgctctcgtcatcctcctcatggcggatatgggcggcgtcgctgcttgtgagctggaggaatacctcctcgagcgtgaggtccgtatttttgagcgcgagcagcggccagcccttgcgggtgagaagcgcaaagaggttgcggcgcaggtcgtagccggccttcgcctcgatcgagacctcgaacacacccggctccttttcgccgagcgaatagacctcctcgatgtgctcgagcgtgcgaatagccgccaccacatcgttttccggaccttcgatgcgggcgatcaggcggtgctccgcggagaggtcgtgcgcgagggagtcggtcgcgccgtcggccacgaggcggccgttgttgatgacgatcacgcgttcgcagaccgcctgcacctcgggcagaatgtgcgaggagagaatgatcgtgtggcttttgccgaggctcttgatcaggttgcggatctcgataatctgcttcgggtcaaggccgacggtcggctcgtccagaatgaggacgggcgggttgccgagcagcgcctgcgcgatgccgacgcgctgcttgtagccctttgaaaggttgcccacaaggcggttgaatacattgtcgatcttcgtcaggcggcagatctcgccgatgtgctgctggcggtcgagcttgacgcccttgagctcgtacatgaagttcaggtactccttgaccgtcatgtcgagataaagcggcggcatttccggcaggtagccgatcagcttcttgacctcgttcgggttttcgagcgtgtttttgccctgaaccgttaccgaaccgctcgtagcggaaaggtagcccgtaatgatattcatggtcgtcgatttgccggcgccgttcggcccaaggaagccgacgatcgtgccctcttcaaccgtgaagctgaccttgtccagcgcgatgtttgcaccgtagcgcttggtgaggtttttgacctcgatcatgattgttaaccatcctttctctgcgggacggagctttcccccggcgcgccttcgcccgcggagcaatttcctccccaactgcgccttggggcgcaggtattgctgaaacaacttaaatataataccgcaattttcgccgttttgcaatagccgtcctgaatctttagcctgaaatttgatcaaaatagccgacaaaatcggttctgccgtgcattataccggccttctgtgacggctatgtgaaaagcagccctaaatttatgaacaaaatgtgaacattccagctcttttgccgtgcaaaaagggccccgcaccgaatgacagccgcacggaagccctctgccttttttcttattcgccccgcagcgcgcggatctccgccggaatatccgccgcacgaaacacgctcgttcccgccacggcgacgtccacgccggccgcacggcacagcgcggccgtctcgcggttgacgccgccgtccacctccagcacaaggcccgggcattttgcgcgcagcgcgcgcaccttttcgagcggctcgggcataaatttctggccgccgaagccgggctccacggtcatcacaagcgccatatacaggcggtcgagatacggaaacagcgcctctgcgggcgtgccgggctttacggaaagccccggctttaagccgaagcgctcgatttccgcaatcgtttccagaatatcgtccgcgcattcgacgtggaacgtaatgctgtccgcgccggcccgcgcaaatttttcgatgtactgcttcgggtgcagcagcatcagatgcacgtcgaacggcatgtccgtcagcggccgcagcgccgcgaccacatccggtccaaagctgatattcggcacaaaattgccgtccataatgtcgagatgcagccagtccgcattctgcaccgcccgcaggctatcacccatccgcgtgtagtcgctcgcgagcatcgagggagctattttcatttttatcacctgtttcttcccgcgctgtccgcggcctgccccgccgattgcgcggcgccgcagcgcatttactgaaaacccgcggcccacccgcccttctgcgcgccgagcggcgggccttccctttcccttcaaatcccggcttttccgccggtcacaaaagcacctgcacgagcaccgcgattagcgggatcgtgatcacggagagcgccgtcgtcaccgccacgctcttcgaggcaagctcggcgtcactgccgtactgcaccgcaaagagcacgcagttcgccgcgacaggcgtcgcgccctgaatcgcggtgctcatcagcagcgtgtcgttcgggcgcgcgagccatacgaccgcgaggtacagaagcggcagcacaacgagccgcagcgccgccatcctgtacacggcgaaatccgagacgaacgcgcgcagcttcacctgcgcgatgtacccgccgacgacgatcatcgcgagcggcgtgttgagcgccgaaatcagctcgaccggctctacaacgagctgcggcagcggcacgtcgagcagatacagcggcaggccgaccgcgatgccgattacgcccggattcaaaaccagcgcgcgcagcttcaccttgccgccgcccatcatcacatagccgtacgtccagcagaagatgttgaacacggcgatgaaaaacgagccgtacagcacgccctcgctgccgacgatcccctcgacgagcgggatgcccatgaacccaacgttgcagaagatcatagaaaagcgcaggacgcggcggcggtccgccgtttccctgcggaaaaagaggtagcttgccgcaatgctgatgacgatcgacgccgccggcagcgcagcggcgagcagcagcgtccagccgtccagcctgccggactccgccgagaggaacgacgagacgatcaggcagggcgtgacgatgtagagcagaaagctcgtgatgctgctgaggctctccttcgtgaacatgcccctcttcaccgtgatatagccgaccagaatgaggatcagaatgacggcgacctccatgactaccgcgaaaaaggcttccacactcagtcctccttatccggcttatcggccttccggcccgcgcggttcagaagatagaactgcacggcgaggatcacaagcacgacgccggtgatcaccttgagcacgatgccgggcgtgccctgaaagaccttccacgccggctgcaccgcgtcggcgagccaccagccgccgagcacgaggaaaaaagcaccggccagatagaaaatcttgttttcctttgcgagccggaagatcagcacaaacccggcgacgaaccagatcaccgcatacatataacccattttcagacctctttttctttctaaatccattttcgcgcagaatacgcagtttaccgtattattatatctgaaatccgccgcgaatacaaggcggaatccgctgaaaattccgccggttttcccggcgccgggcttgcaattcgcgctttctgcgctgtacaatagcagtagcaccgcgggcgtcgcctgccgccgcccgggaaatccgctgaaaggacagatgacaatgaaaacgctcaccgcagacgcctttatgaaataccggtttctctccgacctgatccttgcgccggaaagcaaggccgccgctttccgctgcgccgaggccgaccccgaaaagaacggctaccgccgcgatctctggctgctgccggaaaacggcgccgcccgccgcctgacgacggatggcaaagcgggcgccttcctctgggacgacgcgcagacgctgctcttcaccgcggaccgcgatccggcgctcgccaaaaagcgcgaggccggcgaggactgcaccgcattctaccgcatccgcacggacggcggcgaggcggccccggcgtttacggttccgctcgcggccgtaccggaggccaaggcggcggacgggctctatctgctgcgcgccgactgggacatgcgcttttcgaaagccgcctttttgcagggcaaggcaaaggccgcactgctcgaggaggagaaggccgaaaaggactacgaggtgctcgacgagctgccgttttacctgaacggcgcgggcttcacgaacaagcgccgcagcacgctgttcctctacgacgaaaaggcggataagctgacgcgcgtcacacgcgaatcgtttgccgcaggctctgcgcggctcagcgcggaccgcaccgcgatcctctacaccggcgaggccttcacatcgaagcgccgcgaaaaggcgggcgtctacgtctacgacatcgcctccggcaaaacaaccgaactgctcgcgccgcgcgtctacgatattttcgacgcggtgtggtgggcggacgacgtcctgtttctcggcagcgccgggcgccgcttcggcgtgaacgagaacgcgcagttctaccggctttcggccgagaccggagcggtcgagctgttcgcgccgtttgaggaggccgtcggctcctccgtcggcagcgactgccggctcggcggcggtgcatgcctgcggcaggacggcgatacgctctattttaccgcgacactgcggaacgcctcgcacatcctgtcgctcgaccgcagcggcgcgattgcacccgctttcgagcgcgagggctccgtggactgcttcgacgtgcgggacggcgcgctgtggttcatcggcatgcaggacatgcgcctgcatgagatttacacggccgcggccggcacgaacgcgcccgtgcagcgcaccgcgctgaatgcggatgtgctgcgcgatgtttacgtcgccgcgcccgaaaagctcacgttccggcgcgacggtctggagctggacggctgggtcttaaagccaaaggacttcgacccctcgaagcgttacccggccattctcgacatccatggcggccccaaaactgtttacggcgaggtattttaccacgagatgcagctttgggcaaaccgcggctggttcgtttttttctgcaacccgcgcggcggcgacgggcgcggcaacgaattcgccgatatccgcgggaaatacggcgccggcgactacgacgacctgatggcgttcacggaccgcgtgctcgagcgctggccgcagatcgacaccgcgcgcgtctgcgtaaccggcggcagctacggcggctttatgacgaactggatcatcggccacacgggccgctttgccgcggcggcctcgcagcggtcgatctcgaactggctcagcttcgcctttacctcggacatcggcgagggctttgccgccgaccagatggggctttcacgccgcgacaatttctgggacagccgcgaaacgctgtggcggcattcgccgctcgcctacgcgcgcagctgcacgacgccgacgctgttcctccacagcgacgaggactaccgctgcccgctctccgaggggtaccagatgtattcggcactcaagcagtgcggcgttgaagcgcgcatgtgtattttccgcggcgagaaccacgagctctcgcgcggcggcaagcccctgcaccgtctgcgccgtctgaacgagatcacgagctggttcgaaaagcacgtctgaccggcggcttccccatccggtctttgaaaaatcctccgcacggaaagcgcgcgggcgggaacctgatagaaataggtttccgcccgcacttttttacggggcctatcggccccctcattttcataaaaacacaaaaggactgcgggtgattcccgcagtccttttaatgcgattgtatttcggatcagaccagctcgataatcgccatctcggctgcgtcgccgcggcgcggcccgagcttcgtgatgcgagtgtagccgccgttgcgctcaacgtacttcggcgcgatctccttgaacagcttgttcgtaacgctctccttcgtgatgaaggccatgacgtttcttctgttcgcgagattgtcttccttcgcgatcgtgatcatcttttccgcgagggcacggacttcctgtgctctcgtcgccgtcgtctcgatctttccgttctcgaagaagaacgtaacgaggccgcgcagcatagcgagtctatgtgcagtgtctcttccgagttttcttgttcccggcatgattgtcactcctatcgtttggtaattaaattattcatcgtccttacggaggttaaagccgagagacgcgagcttccagataacttcctcgagcgatttgcggcccagatttctgaccttcatcatgtcctcttcggacttcgagagcaggtcctccaccgtattgatgccggcgcgcttgaggcagttgaaggagcggaccgagagatccagctcttcaatcgtcatttccagaaccttttccttgcccttgtcgtccttctccaccatgatctccgtgctcttgcccttatcggacagatccacaaagagcgtgaggtggtcggtaaggaccttcgcggcgagggaaaccgcctcctgtgcggtgataactccgtttgtccatacctcgagcgtcagcttatcgtaatcgatgctctggccgacgcgggtaggctctacgttaaagtttacctttaacaccggtgtgtaaatagaatcaactgccaattcgccgatcacgccctgcggcatgctctgcttattgcgctcgccggaaacatagcccctgcccttatcgagcacgatctccatgtacagctttgcgccttctccgagtgtggcaatgtgcaggtcggggttaaggatctcaacctcgctgtcgcactttattgaatccgcggtaaccatgcagggaccctcgaccgcgatttccacggtcttcgggccgtcacagtgcagctttgcgatgaggcccttgatattcagcacaatttcggtgacgtcttccttcacaccgggaatggtggagaattcatggacgacgccgtcgatcttgatcgatttgaccgcaacgcccggcaggctggagagaagcacgcggcgcaggctgttgcccagcgttgtgccgaagccgcgctccagcggctcgacgacgaagcgcccgtaggtgctgtcgctcgaaatttcctcggtctctattctcggtctttctatctcaatcatttgcgatcctcctttacacatttgacgtaattcgtaaaatccatttaagatttaggaattacttggagtacaactcaacgatgagagtttcgtcgacctcgaggtcgatgtcctcacggaccggcattgcagcgaccttcgcctcgcaggcggccgcattgagctccagccacttaacgaccggctttgcggcgttggcttcgagaacagccttaaacttctccgaggagcggctgccttccttaatagcgacgacatcgcccgccttcacgaggtaggaggggatatcgaccttgcggccgttgacggtgaagtggccgtgaacgacgagctggcgggcttccgctctggaggaggcccagccgcagcggtatacgacgttgtcgagacggatctcgagaaggctgaggaggttgtcgccggccttgccctgcatcttcgtcgccatctcgtagtaatgtctgaactgaccctcgagcacgccgtagtagcgtctcgtcatctgctttgcgcgcagctgcatgccgtactcagacgtcttttttctgccctgaccgtgctggccgggggcataggctctgcgcgtgatcgcgcacttatctgtatagcatctctggcccttgaggaacagcttctgaccctcgcggcggcacagcttgcagacagcatctgtatatcttgccattgtttgtaacctcctaatcttttatacgcgtcttctcttcggaggacggcacccgttgtgcgggatcggcgtaacgtctttgatcatgctgacctcaagacccgccgcctgcagcgcacggattgcagcttcacggccggagcccgggcccttaacaaagacctcgacgctcttcatgccatgctccatggcgatcttcgccgcggtttccgcagcggtctgcgccgcgaacggcgtggactttctggagccgcggaagccaagctcgcctgcgctcgcccaggaaactgcgttgccctgtgtatctgtgatggttacgatcgtgttgttgaaggtggactggatatgtgcagcgccacgctcaatattcttgcgctcacggcgtctgcggactgcggtaactgctttctttccgccttttgttgctgccatttaagaatccctcccgattacttcttcttgttggccattgtctttctcggacccttgcgcgttctcgcgttggtcttcgagcgctgacctcttaccggcaggcccttgcggtggcgcacaccgcggtagcagccgatttcaataagtctcttaatgtcgaacgcgacattgcggcggaggtcaccctcaaccgtacagttgtggtcgatatattctctgagcttcgttgcgtcgtcctcggacaggtctcttacgcggatgctcgggtcaacgccggtagcagcgcagatatccgacgctgtcttgcggccgatgccgaagatgtaggtaagagcaatctcgattcttttatctctgggtaaatcaataccggaaatacgagccatgcttattgcacctccatgataattgcagagcctcagccctggcgctgcttgtgcttcgggttttcacagataaccatgactttacccttgcgcttgataatcttgcatttttcacacatcttcttgacagaaggtctgactttcatgtgtataccctccttatgaattgtggggtttcattctctgtttccttatttggagcgccaagtgatgcgccccttcgtcagatcatacgggctcatctcgagcgtcaccttatcgccgggcagaatgcggatgaaattcatgcgcagcttgccggagatgtgggcgagaatcatgtgcccgcccggaatctccacctgaaacgtcgcgttcggcagagcttccttaacgattccttctacttcaattacgtcctgttttgacatactatcaccaatccttaatcgtagtctgctctctgaaattctgcgagagctaagcgtatctgccgattggtcgaaaggctctcttccgaaagcaccgcgccggccggcgcaaggtgcatcagcttctttttcttcgggtgatcgagcgtccggcgttttccgtccgccatataggcgaacgcgccctctgttttcagcaccgcctgaaaatcgcctttgtcgtgacctgcgagcgaccgcatgatctgtccgcgccgaatctccatagcggtatcctcagtcgagcgccgtgagaatcacggggccgtccttcgtaatggcaatggtgtgttcaaagtgggcggaaagcctgccgtcgcacgtcaccgtagtccagccgtcgccgaggattttcacctcgcagccgccggcgttgaccatcggttctatcgcgattgtcatgcccggtaacaggcgcacacctcttccgggtgtgccgtaatttggaacacttgggtcttcatgcagcttcgcacctacgccgtggccgacaaattcgcgtaccaccgagtaattgcgagcttcgacatactgctgcaccgcggagccaatatcgcccagccggttgccggggcgtgccttgtcgattgcaaggaagaggctttcgcgtgtcgcgtccaaaagcttctgcgcttccatcgagatctccccgcaggggaaggtccatgcgttgtcgccgtggaagccctcgtaaaacgcgccgacgtcaatcgagacgacgtcgccctccttgaggatctgctttgcggacggtatgccgtggatcaccacatggtttaccgaaatgcaggcgcttgccggaaaatcgccgtaaccgagaaagctgggcactgcccctgccttctcgatagatttacggacgattgtgtcgagctcgagcgtcgaaacgcccgggcggacggcttcaccggccttaagcaatgcctcctgcgaaatctttcccgcatcccgcatgcagcggagctcgcgggtcgttttcaggttgatcatgcttacgcctctactgccttgagcgtgagggcggtcgtatccgcgacctcctcctgaccttctacgatcttcagcttgccctgcttctcgtagtagtccttcagtggctcggtctgctcgtgataaacgcgcaggcggtctttaacggtatcggggtggtcatccttgcgctgaataagggtgccgccgcagtttgtgcagacgccctccttctccggctttttgtaaagcaggtggtaagaggagccgcacgcttcgcagacacggcgtccggacattctcgtcacaatcttctcgtcgggcacctcgatgtcgatgacccggtcgatgacaatgccggaggcgtccagagcctcggcctgcggaatggttctcgggaaaccgtcgaggatgaaaccgtttttgcagtcctcctctgcgagtctgtccttgatgatgccgatcacgacgtcatccggaacaagctggccggcgtccatataggttttcgccttgaggcccatttccgtgccgcttttcagcgcttccctcagaatgttgcccgtggaaatcgcggggattccgaggtgcttgcagataacttctgcctgtgtgcctttgccggcgccgggagcgcctaaaagaatcagcttcattttcatgactcctttcgtcacttctgtctctcgtctgtgctcccttagtcgaggaagcccttgtagtggcgcatcatcatctgagactcaatctgcttgaccgtctcgagcgcgacgccaaccataatgatgaccgaggtaccgcccatggtgaggccgtgcatggcggtcacattgccgtagataatcggcaggatcgcgacgaccgcgaggaagattgcgccgatgagcgtaactttggaaaggattttgctgatgaactccgccgtcgggcggcccgggcggatacccggaatcgtgccgttgttcgtgcggaggttgttcgccatctcgatcggattgtactgaatcgtcatgtagaagtaggcaaacatgatgatcagcatcagatacaagatgctgtagagccagccggaggtggagaaggcgtcaaagaagcccttccagaagcccgtcggctcggagataaacatccgaatcgtactcgggatggagaggatcgccgaagcgaagatgaccggcataacgccgctcatggtaaccttgatcggaaggaacgtgctctggccgccgtacatctttctgccgacaaccttcttcgcatactgcaccgggatgcggcgctcggaatcgttcatgaaaacgatgatccaaatgaccgcgaggaacaggatgacaaagagcggtgcgaagataaagtactggctgtagctttccggagactgaagcgccgccgagaagtagctccagacctgaccggccgtaaccggtagacgggccacaatgcctgcgaacaggatgatcgagatgccgttgccgacgcccttctggttgatctgctcgcccatccacatgatcagcgcggtgcccgcggtaaacgcgagtacgatgatcagcgcggagaatacggcggagaagccctcgttatacagcgtaacgccgctgttcttgaggaagaagtagtacgcggtgccctgaatgaggccaagcgcaaccgtgacgtaccgcgtgatcgcggcgatcttctttctgccttcctcgccctccttcgccatgcgctcgagcggcgggatcgccaccgtcagaagctgaatgatgatggaggagttgatatacggggtgatgcccattgcgaacagcgttgcgtttgcaaacgcgccgccggtgagcatattgacatagcccagcgccgtctcattggcgcccgccataatatcggccagcgcggaagcgtccagaaacgggacgggaacgaccgaaccgaaacggaacgcgatgataatcaaaagcgtaaaaagaagtttttttctgagatcaggaattttccaagcgtttttaagtgtgttaaacaacttaaatcacctcggccttcccacctgcagcttcgatctttgccttggctgcttcggagaaagcgctgaccttaacggtaatcttcttttcgagcttgccgttggaaagaacctttacaccgtcgcaggcggactttacgatgccggcctcaacgagcgccgcctcatcgacgactgcgccgtcttcaaaagcgttgagggcgttgagattgattgcaacgatctccttcgcgaagatattgttgaaacctctcttcgggattcttctctgcagcggcatctgaccgccttcaaagccgggacggaagccgtgacccgctcttgccttctgacccttgtggcccttgccggcggttttgccgttgccggagccgtggcctctgccgatgcgctttgcttcctgctttgcgcccggggtcgctctgagttcgttaagcttcatgttcacacacctccttagcctttgctgacctcgaccaaatgaatgatcttattgattttgccctgcgtctgcgcgttgtcgggctgcgtcgtcgtatcgccgaccttgtgcaggccgagcgcctcggcggttgcaagctggggcttcttgcagccgatcaggctcttcttcagcgtaatttttacgtctgccatcttgcaaacctccttacagaatttctttcacggacttgccgcggaccgccgcaacttcctccgccgttctcagctcagaaaggcctgcgagcgtagcgcggacgacgttgcacggattgttggagcggagcgccttcgtacggatatccttgatgccgacgctctcgacaaccgcacggaccggaccgccggcgataacgccggtaccgggggctgcgggcttcaggagcacgcggcctgcgccgaattcgccgatgatttcatgcgggatcgtggagccgcgcagcgcaaccttcatcaggttcttctttgcgtcctcgatgcccttgcggatcgcgtccggaacttcgccggacttgccgatgccgaagccgacaatgccgttgccgtcgccgacgacgacgagcgctgcgaacttaaagatacggccgcctttaacggtcttggaaacgcggttgatggcaactacgcgctccttcagatcgagggtggatgcgtcaattttcatagccaaaacaatattcctccttgcttagaagttgaggccgccctcgcgggcgccgtcggccagctctttgacgcggccgtggaagatatagccgccgcggtcaaaaaccacattggtgatacccttatctgctgctctcttggcaatcatcttgccaacctcgcgtgctgcttccttgtttccgccgttgccggtaaacgccttctcaaccgtggacgccgcgcaaagcgtaacgccattcacatcgtcgatgagctgcgcgtaaatatgcatgttggagcggaaaacatcgaggcgcggtctttccggtgtaccgttgatcttgccgcggactctcttgtggcggcgcagtctggctacgttcttatctgccttactaaccatttttatctcactcctaacctattatttacccttaccggtcttgccttccttgcggcggacaacctcatcaacatacttgatgcccttgcccttgtacggctccggcggtctcttctcgcggacttccgccgcgaactggccgaccttctgcttatcggcgccgaggatgataatcttgttcggggccggaacctcgatcttgatatcctccgtttcggagacgataacctgatgcgagaagccgaggttcatcacaaggtccttgccctgcttctgaacacggtagccgacaccgttgacttcaagctccttcttaaagccctcggtgacgccgacgaccatgttgtggatcagcgtgcgggtgaggccgtgcagcgagcggttttccttctcgtcgttcggacgtgtaacaacaatctcagcgccctccacagcgatgttcatgctcggctggaacgtctgggacagcgtgcccttcggccccttcaccgtaacgcagctgccgtcgattttaacctcgacgcctgcgggaatatttatcggttttcttccaattctggacatgttattgcacctccctgattaccaaatgaacgcgagaacttcgccgccgatgttcatctttctcgcctcgcggtcggtcataacgcccttcgaggtggagatgatcgcggtgccaaggcccttcatgaccttcggcagctctgctgcgttggaatagatgcggagacccggcttcgagactctcttgagccccttgatcgcggagatgccgccctcaacatacttcagtgttacggtgatgacgccctgtttgccgtcttccttaaccgtaaagcccttgacatagccttcgtcaacaagaatctggcaaatagccttcttcatgttagaagcagggatgtcaacagtgtcatgctttgcagactgagcgttgcggatacgggtaagcaggtcagcgattgtatcagtaatctgcatgatttattaacctcctattagctttttaccagcttgctttcttgacgcccggaatctggcccttgtaagccagctcgcggaagcagatacggcagatgccgaacttgcgaaggtaggcatgcggcctgccacagatcttgcatctgttgtattcgcgcgtagagaacttctgctctcttgcctgcttgagtttcatagaagtcttggccacagtattccctccttacttctcgaacggagcgcccatgagcttcagaagctcgcggccctcttcgtccgtctcagccgtcgttacaaagcagacatccatgccgcggaccttgtcgattttatcgtactcgatctcggggaaaatgagctgctctttaacgcccaggctgtagttgcctctgccgtcgaatgcgttcgggttaatgccgcggaagtcacgcacgcgcggaagcgcgatgttgaacaggcggtccataaactcccacatcttctcgccgcgaagcgtaaccttcacgccgatcggcatgccctcgcgcagcttgaagttcgcaacggacttcttcgccttgcagacaacgggcttctgaccagtgatcttcgcgatatcggcggagatggaatcgatcaccttcgcgttgtccttcgcctcgccggcgccgacgttgatcacaattttatcgagcttcggaacctgcatcacactcttgtagccgaatttcgtcatcagagcgggcgcgacctcagccttgtaaaaatcattcagtcttgccattttgtcttcctcccattaaagcgactcgccgcattttttgcaaatgcgctctttggtgccgtcctcgtacagcttgtgggcgacacgcgtgggcttgccgcagcgggggcagacaacctgaaccttgcacgcgtaaatcgcggactcggccttgatgatgccgccggcctcgcccatcttgcggggctttacatgcttcgagacaatgttggcattctcgacgatgaccttgccctccttcggggaaacggccatgaccttgcccttcttgccgcggtccttaccgctgaggataacgacggtgtcaccggtttttacatgaactttactcatttcaggacacctccaattaaagaacttccggggcgagggaaagaatcttcatgtactccttgtcgcgcagctcgcgcgcaaccggcccgaagatacgtgtgcccctggggtttttatcgtcacggatgatgacggcggcattctcgtcgaaacggatgtaggtgccgtcctcacggcggacgccggaagcggatctcacgataaccgccttgacaacgtcgcccttcttaacaactccgccgggtgctgcttttttaacggaagcaaccacgacgtcgccgatatttgcatacctccggcctgtgccaccgagaacgcggatgcacataagctccttcgctcctgtgttgtcggccactttgaggtaagtctgctgctgaatcacagtaattcctccttctgctaaagccgattatttggctttctcgataatctcaaccaggcgccatctcttatccttagagaggggacgagtttccatgatgcgcactctgtcgccgatgccgcaggcgttctcttcgtcatgcgccttgcgcttcacggtacgcttgatgatcttgttgtaaagcggatgtctgtaactgtcctcaacagcaacaacgattgtcttgtccatcttattgctgacgaccttgccgacagttgtctttctcatgtttctttcgctcacttcttaatcctcccttcccttacgcgttctctttgctaagctcattcgcgcggataactgtcttaacacgagcgatgtccttcttaaccgccgagatgcgcatcgggttttcaagctggttaatcgcgagctggaatctgaggttaaagagctcggctttgaggtcattcagttttgtgttcagctcgtcagcagtgagctgtctgatttcagaagctttcattactcttagccctcctctttagtaacaaacttgcacttgatcggaagcttgttgctcgcaaggcggagcgcctcgcgggccgtctcttccgaaacgccgccaagctcgaacataactctgccgggcttaacgacggccacccagtattcgggcgagcccttaccggaacccattcgggtttcagcgggcttctgcgtgatcggcttatccgggaaaatcttgatccagaccttaccgaaacgcttgcagtaacgcgtcatggcgacacgggccgcctcgatctgattggaggtgatccatgcgggctccatcgcctgcaggccgaaatcgccgtatgtcaccttattgccgcggtatgccttaccggtgagacggcctctgtgcactctgcggtacttaactctcttaggaagcaacattacgcacgccctccttccttcttgctgtttctgcggctgcggttctcattgagaacctcgcccttgtacagccaaaccttaacgccgattctgccgtacgttgtagcggcttccgcgaagccgtagtcgatgtccgcacggatggtctgcagcggaatcgtgccgtcgtggtactgctcgcttctcgcgatttcagcgccgttcagacggccggacaccatgatcttgatgcccttcgcgccgagcttcatcgagcggccgatgcactgcttcatcgctcttctgaaagcgattctcttctcgagctgctgtgcgacgttctccgcgacgagctgcgcgttgagatccggctgcttcacctcaacgatgttgatgacaaccggctttttgagctgcttctcgcactggatgcggagcttctcgatttccgagccgcccttgccgatgaccatgcccggcttggagcagtggatatgaatgcggaccttagaggcgtcgcgctcaatttcaatcttcggaacacctgcgaggtagagctgcttcttcagcgtctttctgaggttgtagtcctcaaccagcgtatcgccgaaggaagccttctttgcgaaccagcgggaatcccagtctttgatgacgcccacgcgtaagccgtggggattaactttctgacccataatgtgacctcctcgcttattccttctctttcacaacgagtgtgacatgagaggttctcttcaaaattctgtaggctctgccctgtgctctcgggcggattctcttgagcgtcgggccggggcagacgaagcactcggaaacatagaggttgttcttatccatgttgaagttgttctctgcgttggccactgcgctcttgaggagcttctcgagatcttcgcacgccgccttcggggtgtgcttgaggatcgccatagcgaggtctacgggcttgtttctgataaggtccagaacgatctcaaccttgcggggagaaattcgggtatacttcagaactgcttttgcttccatctttatactctcctttctctcagcggctggtcttggaaccggcgtgacccttgaaggtgcgggtcggggcaaactcgccgagcttgtggccgaccatatcctccgtcacataaaccggaacgtgcttgcggccgtcgtggacggcgattgtatgaccgacgaaatccgggaagatcatggaggcgcggctccacgtcttgagaatcttcttctcgccgttctcgttcattgcctgaatccttttaagcagtgcgggctgacaaaaaggacccttttttaagcttctgctcatattcttttaagctcctttccgtgccttacttaccgtttctgcgcttaacgatgaacttgttgctcgccttcttcttagcgcgcgtcttgtagccgagggccggcttgccccacggcgtgaccgggcccgggcgtccgacagggctcttgccctcaccgccgccgtgcgggtggtcgttcgggttcataacggaacctctcacggtcggtctccagcccatgtttctcttgcggccggccttgccgatcttcacgttctcgtggtcgatgttggaaacctgaccgatggaggccatgcaggcgtccggcacatttctgagctcgccggagggcagtctcagcagcgccatgccgttttccttcgccatgagctgcgccatgatgccggcagcgcgggcgagctgtgcgcccttgccggggtagagctcaacgttgtgcacgaaggtaccggtcgggatattggcaagcggaagcgcgttgccgggcttaatgtccgcatccttgccggagacaaccttgtcgccgaccttcaggccgttcggcgcaatgatatacttcttctcgccgtcctcatactgcacgagcgcgatgaacgcggagcggttcggatcgtactcgatcgtcaggaccgtagcggtcatgtcgttcttctggcgcttgaagtcgatgatgcggtacttcttgcggttgccgccgcctctgtggcggacggtgattctgccgtagctgttgcggccggcagccttatttttcggagccagcaggctcttttccgggccacacttgctcagaccgctgtagtccgtggtggacatgttgcggcgcgcattcgtggtcggcttataattgataattgccattgtgttttctctccttatttggctttgcgggaacgggccgtttcccattcatgcccttcggggtattcttcgggcgattagatcatcgactcgaagaactcgatcgtcttgctgccctctgtgagcgttacaacagcctttttccaagctctggtgtagccctcgtatctgccctgacggcggaacttgccgcgcacgttcagcgtgttgaccttctgaaccttgacaccgaacagctcctcgaccgccttcgcgatctcgatcttgttcgcatccttgcagacctcaaacgtgtatttcttctccgcattgccggccatggatttctccgtgatgatcgggcggataacgatgtcctgcgctttcattatgcgtacacctcctcgattttggagacggcatccttcacaacgatgaacttatcggcattgaggatgtcgtatacgttcagcgtattgacctgcgcggtcttgacgccggggatgttcgcggcggaagcgatgaccttggcatcgacctccgggagaacgatgagcgccttcttctcgctgccgagcgccttgagcatctcggcgatcttcttcgtcttgtagccctccgtcgtgatggcgtcgacgacgatcatttcattgtcctgcaccttgctcgaaagcgcagacttcatcgcgaggcgcttgaccttcttgttcagcgtgacggtgtaatctctcggcttcggcgcgaacacgatgccgccgtgcgtccactgcggcgctctcgtggagccctgtcttgcacggcctgtgcccttctgtctccacggcttcttgccgccgccggaaacctccgcgcgggtgagcgcggactgcgtgccctgtctctggtttgcgagatacgccttgaccatatcattcatgacggaaacgttgggctcgataccgaaaacctcagcggaaagctcgatcttctcgacctctttgcccgccatgttcataactgctactgtaggcattctttattcctccttcccttacgcttttacgctgtcgcgcagtacgaccgtaccgccgttggggccgggaatagcacccttcacagcaatcagattgttctccgcatcgaccttgacaacggcgaggttctgaaccgtaaccttctccgcgccgaggtggccggccatcttcaggcccttccaaactctggacgggctggagcaggcgccgttggagccgccgtggcgggcaaccgggccggaaccgtgggtttccttcagtctctggaagttccagcgcttgatgacgccggcgtagcccttacccttgctgacgcccgtaacgtcgaccttgtcgccgttctcaaagacgtccgccttgatgaggtcgccgacattgtaagccgcgcagtcgctcattctgaactccttcagggtcttcttcggggcgacgtcgcccttcttgaagtggcccgtgaggggcttcgaaacgcgctgcggcttctggtcgccgaagcctacctgaatcgcgtcatagccgtcgttttcaacagtctttttctgtgtgacaacacagggaccggcttccacaactgtcacggggacgactctgcccttttcgtcgaaaatctgcgtcatgccgattttcttgccgatgattgccttctgcattttgtatcctcctgttaggttattggtcggatttctccgacgtgaccctcctgcctgtaggttgagcggcgtatgccgacaatcgattaaagtttaatttcgatctcaacaccggcggggagctctaagcccatcaacgcctcaacggttttgttgctgggtcttaagatgtcgataagtctcttgtgggttctcatctcgaactgctcgcggctgtccttgtacttgtgcacagctctgaggatcgtgatgatctgcttctcggtcggcagcgggacggggccggaaactctcgcacccgtgcgcttggcggtctgcacgatcttctccgccgactgatcgacgacctgatgatcgtaacccttaattcttatcctgatcttttccttgactgccactaaaatcgcctcctgctgttttgtaagttggcgggctgtacgggtttttatgttttaaacactgctccgggtgttccgccggaagccatagaaaaaccggacatccactttcgtgaattccgggatcgttcgggccggtgtaaaacacaaaccctgcacataaaaaaccatctaagcgcattttcgtccggcctgtgcgccttaaaaatcagcgcatggttccgcgcgccactccacacggggagccgcttcgcttcgattgttgtcgcccggtttaaaatcggacatactccacggaaaaaccggccgtatcggccgcaacctcccgcttcatcgcatatctgtcgcagtcacgcttagttattatagcaggcaaatctcgaaaaagcaagcccttttggaaagattttttcagattttctgcggcttttccggtttttcccaaatgcgccgcattctgtgctttgaggcgccgccggccgccgtttgaaagcgcgaaaaccggggcggccaaagctgtcccctttaaattcagtgtaccgctttcggcgcaatccgtcaacaaaaaaacagcgggcagccgaagctgtccgccattttctgtatgttctcagttacccgccggctcaatgtgcaggaagtccatcgtttccgccgggtcgcgcccgtccgcggaaaacacaaaccgctgttcctgcccgtcgtccgtgagctggagaaaagccgccgcgccgtcggtgccgtagacaaagcgcatcccactgattgcgtttgcctcggggtcgtaccagccgcccgccgcatagcggaccggcccgtccggaaacgtcgtctcccacaagcattccaccggctcgtaggttttcgcgccctgccccgtctccaccgcgaacgacgcccgcagctccgttgtgcgcaggatgcggcacagccgccagccctcggcttcgagcgcggcgggctccgccgccgcggcgccttccacccgcacgccggaaagcgacatgtgaaacggcaggggcaacggcacgagccagagcacgagcgcgagcagcacggcgcacacgcagacccgtttgatgatttttcggttagacgcactgactttcatgccgatccctcctgcccttttatttcagtataccgtatcccacggcggccgtcaacaaaaaccggcggacagccgaggccgtccgccggttccgtattcttattttgaaatcaccagcccgcgcggatgacgtagacattcatgttgcgacggccgaacgccgtgcagtcctcaagcgtatcgtagtagaggtccgccacgatgtcgcccgccatggccgcaccgcccgtatccatcgcgtaacagtagccgtaggtccacgagccgtccggcgctgcgatgtacagcagcgagccgtacgggatgagattcggatccaccgccacatagccgacctgcggcgtcgcgccgatcgaggtcacggcgcccggctccgcgtaatacgcggtgcaggaaccgtacaggctgtacgcataggagaccgtttcgccggaagcatccacaaacgtgctgccgcccgatgagccgctgccagaaccggagccggtattcgcctccgtgctcgggcgttccttcgtgccggtgagaatgacctcatcctcggcctttttcagcaccttttcctcgagcacctcgcggctgcgctccttgccgtccgcgtaaacgaccttgtaggtgacttccttctcgccctccacgccggcggttttgacctcggtttcatcctcatacaggtcgccgctgtcctcgtagacagtgccgtaatcgatggtctcggtctccgcgacctcctcggtcgtgatgcgcaccacgcggatcacagcgccgtccgccacatggtcgccggcgttcacggtcttttcaccgtcacccgtttccgcgcggatctcatccagctcgccgagcacgatgccggcactctcgagcgccgcgccgtagctctccgctgaaacgctgtgcgtattcgtctcgccgtccgccgtgaccgtcacggtgatatagcgcgcaacgcggatgcgcatgccgttctcgagcggcgtatcagccgcaggcgatacctgatccgcatcgccgagcgtgacgccggcgtcaagcaaagcatccgccaccgtaccgccgagccggtcgagcatccggcgcttgccgtctgcctcaacgaaaacgcggctggaccgcgtcacagaagccgcggtatccgcaagcagcgccgtatcccttgcgggctccgtcacgtcgcggtcgccgagcgcaatgccgccctgcaccacagcgtccttgagcttcgtacccttcggcacgacaaacgacgccgtggctccgtccgcctccaccgaaacgcgcaccgcgcgctcaaccgtgagcaggccgtccgcctcatcgaacgcataggtgtcgatttccgagacgggcgccatgccctcggtctcggcgcgggcgaggatttcctcgggatccctgcccagcacgctgaaagtgtatgtgcttccgccgtccttcacggtgacctccaccgtgttggccataacggtaacaaccgaaccgacgcagatcatcgcgacgagcgctgcaacaagcagtatgcgcggcatccgccggttccgtgttttttttacgtggcgcataaaatgctcctttcctgaacagaacacttgcttcggctgcggcattctgtgccgcccgcctgaaactctcttcttgaaccgagccttgcccggcgctccctatgaatcaccgggctccttctatgaatcatcaggcgtcctcttgtgaatcatttgtgagtatagtagcaaagtaacgatctgtcaagttttcagagcctattcttttgttcattttgccacattccgaatggcgatcaaatttacataatcgtcgcatatcttctaatcgataaataaatttgatatttttaaaaccaagctgcagccgcctctgtgcattttgcaaaaactttgcaactcttttgcgatcgaacatcaattcttgttgtatttttctgcatatttattcttttaatttttttgtttttcagccttttttctgccttttgtaaaggggattcgtatattgttgcggatgtgattcatttttcgaccataaagaacatggcgcttgctgcggaaaaacgccggcgttctattgagaaaaacggcttcttgtcccgaaatcttgtccttcccatccggttccgcccgatatgcgccttgcatgccgcgcttttatgcagaagtgcgcgatccccaccccgccgcttcgttttgcctggattttccggaaattattgtcaacgaatgtatattcgcggtatatttcaggcagaaaagtcccttttcagggacggccgccaatccccctcgccgcagccgtcagcgccgcagataggctgtgagctcggccgccgccgtgcggtgcgccccgacgcccgggtggttccggcagccgcggttctcgatatcgtctgtaagcggcaggaatacggcacggctgtcgccgctctccgcccggtacgccgccacagcggcctccagtgcaggcgcaagctcaagccccagcatgccgtagatccagacgagccgcgcccttggattgcagcgccgcagcgtgcgcagaaatgctttcaccttctcctgcaggcgctcgacatccgccgcgcagggactgccgtccgccgcgcggcggttctgaaagcactcgccggtctcggcgtcgcaccatgcgggctggctgaacgcgccgcagtcgttcgtgccaaggttgatgaagatataatcgggctgccacgcagcgaaatcatggggccggtgcgcgccgagcgccgcattgcgttcgccggagagcaggccgcagaccgcctcgtatacgggcgggattgcgttgcgcgggttgttgtcccacccgcagccgacgccccagccgctctgcgagagcacgcgcacgtcggcgtccagcgcccgcgccgtcatcaccgcgtagttgttttcggcgctgaaaaacatggggacccagtcctcctcggctttcgcgccgatgtcgccctcgccgcttgtgatgctgtcgccgataaactcgagctttaatgcacgcggctttaccggctcaaagccgccgtccgtctccagcgcgcagatttgcagcaggctttcggggtcaccgctcatcgcctgcgtatccttcacgatccgcacgtttttgaccgtttccggattcatgccgcggaaaacacagacgcggtgcgttcccctttccgccatgcggcgggacagaaattcgccgttcacggcgaagctgaaccacggctcataggccgaccagtctgcgtgcagctccacccagagctccgccgcgcggacattgagctcgagccccgaggccgtccagaacaaggtgagcgggtccgtctccccgttcgtccgcccgtgcacgaggtgcggcacctccgatattttccagcgtttcatttggaccagccctttctgacgcgtgtcttttttcttcttattatataggcatttcccggccgcagtcaagacggttatcggtttcgccctttcgcgccgcttttttcttgccggacacgccggaagtcttttctgcggcgcgcggaagccccgccgcttctccaaacggaaaaacagcggggctcgctttattctaaatcttacgggcgctcaaacggctccgtgcagatgaggcggatctcctcgatttccatgccggactggccgaaatagagcttgaggtaattcgtgccgccgaacagcacgctgatgtcctgctctgcggtgatcgtctcaccgttcgtgccgttgatcataatcatgccgcgcagcatgccgtcgatgaagatcgacatcgggatctgcgccacttcgccggcgtctgccttcacacgcatcgagagcttgtacttgccgttcttcgtgtagcggatgccgaacacggtagacgcgcccttttcggtgtcgagctttgcgaggtcgagcggtgcgccgtcgtcgatcaactggtactcgacgtcgcaggcggccaaatcgccggacgccgcttccgcctctgccgccgcgcgctcctcatcgctgacgcggccgaggctgcgctccatgacgggcgatttcatgatggaaacgcagatgtttttcgccgcgcgcacgagcgcctcgcggctcaggcggccgtccttgattgcctcgggcatgttgtcgccctgactgttcgaggccgaatccgcgttgaccatgttgaggtcgttctgcgcgcgcacctgcgccgccacgttttcacgcgtgccggcctcgccctcgtcgctgcccttggcccaccagtcggtcatcaccgcgccgtcgaagccccactccccgcggagcaccgtcgagagcaggtcgtaattgctggcagtccacaggccgttgagcgcgccgtaggtggacatcacaaagtacgcgccgccctccttgaccgccatcttgaacgccggcagatagatttcgcgcagcgcgcgctccgaaacgatcgaatcgatatcggtgcggtggaactcctgattgttgcaggcgaagtgcttgaccgtgccggtcgtgccccagcggtgcatgccgcgcagctgggccgccgccatcttgccggtcagcagcgggtcctcggagaaatactcgaagttgcggccgttcatcgggttgcggtggatgttgaggcccggcccgagcagcgtatcgatgcggtttttcctgagctcgaggccctgcatcgcaaacagctcctcattcagctcctcgctgaacgtgcaggcgagcagcgtgccgttcggcaggctgaacgcgatcgagccgcagtccatgcggatgccggaggggccgtccgagcagcaggccgtcgggatgccgaaatcgagcaggttctgcgtgacgccgccgaacgcgccgccggtgccggccgtgaccttcggcgagttcatgccctcgccgcggataaggcagatcagatcctcggtcgggatctgcgcgatgaattcgtcgagatcggccttgccgtcgaacacgtcgccgagcttgatgcccttgtcgccgctgtagggcaggcaggcgggcatggccgccgcgctgcgcgccgccatgctgtaggtgcgctgcggaaccggctcccacgcgaccgtgtacgcgccgttctcgagtttcgcgtgcatgcggtcgaacgcggtgaccggcgcgcaggcctcggtgagctgctcgacgacggtatcctccgcgatctcaaaactgccgctcagcgacgcacagcggacgcacgcgcccgtatagatgttgtaggcgccggcctcaagcacataggccgacttgtggccggtgacgccgctgtcgtcgtacgacgcgagcgatgcgatctcaaacgcgatttccacggcctcgctctcgccgggctgcagctcggcggtctttttgaacgcgcacaggctgcgcgccgccttgccgagcctgccctgcggcgcctcggcatagacctgcacgacctgcttgcccgggacgtcgccggtatttttgacgatcacgacttccttgacggtctcgccgtccgattcaaagcccgcgacctccatgtcgaacgtcgtataggacaggccgaagccgaacgggtacagcacgcggtccttcgcgaacgtctcgaagtagcggtagccgacgtagatgtcctccttgtagacgaccttttcggggtcgccgaagccctcgctcgagggatagtccgcgatgtcgacggcgatcgtgtcgctgagcctgccgcacggggagaccgcgccggtcagaacatccagcacgccggcgccgccctcctgaccgccctgccacacatagaggacagccgcggggtcgtactttgcgacccacttcatgtcgatgatgttgccgacattcagcagcacggcaacgcgcttgaacgcaccgcagaccgtttcgagcatctgctcctcggtcttcgtgagcaggtagctgccctcggtcgggctgttgtccttatcctcgccggcggtgcggccgatgatgacgagcgcgagatccgactgcgcggcggcctctgcggcgagcgccgcggaaaccggcatctcctcctgacaccacggctcctgcgcccagcccttgcccttttcaaacggatgctccgcaacccaatcgcggtagaccgtttcgagtttttcgttgacggcgacgtccgggcagctcttcagcgcatcgagaatgccggtgacataccgcgtattgactgcgccgccggagcccgtgccgctcttgtagtagtcgaactggattctgccgaacacggaaacgcgctcgcccttgcggatcggcagggccttgccgtcgtttttgagcagcacgcagccctccgcgacggtctgccgcgccagagcggcgtagcggtcgagatcaagtgtatacggattcatttggcatctttcctttctgttcattcaggccgccggaaaggcggcaggcgcaggctgcggcgaaacgccgcgcgccccgcaggctttgttttcctctttttatcataatctattttcccttttctggcaagagcgcacagaaaaaaagagttcaaaaaagcggctttattcaaagaaacaaaaaaattccctgcggttttacattccggcgattgtaaaatttacaggaaacggttatgatagagatatactctttcggccgcgcgccggcctttctgcagcggcgttcccgccggcgcagatgaacggccgctccgggtttgcccggcggcctctcgcccccatttaaactataagaaggaccggtgaaccccatgcccgctttttacgcccactaccgcttcggctgcgaagcgcttgaaatcgcagcgctcgagagcgcaccctctgccatacagacgctctgccgcgagaaccgcgcgctgttcgacatcggcctgcacggccccgacctctttttcttctaccgccccatcctgcccaaccgcgtaaaccgcatcggccacgaggcgcaccacaaatcgggccgggaatttctcgcgcgcggcaaaaaagtgatcgccgccgcaaagaataaacccgccgcacgcgcgtatctctacggacttttgtgccatttcgcgctcgattcgctctgccatccctatgtggccgaggcgatggccgaatacgatgtaacgcacgccgccgttgaaacagccttcgaccgcgcgctgctcacacgggacggcatcgatccgctgacgttcgacccctgcgggcacttcgagacgacgcgccgcaatgccgccgtgattgcgccgttttatccaccggccgtgaccgatattgtggaaaaaagccttaaatccatggtgttttacgggcgcgtgctctacagccgaaaccgggcgctgcgcgccgtgatcgacaaggggctctacgtcacgctgcaccacgacgcgatcgccgacatgatgatgagtgagaagcgcgatgcggcgctcgccgaaagcgacgcgcggatgtacgccctgtacgaggaagcgttggcgctcgtgcagcggctgttcctcgaggcggacggctaccttgaaagcggcaagcctgccggcttggatttcgacaaaacctttgaaggctgacgcggtaagctaaatatatccccgtcggcgaagcgtgcgctgcttttccctttgcattccctgcacgccaatttaaaacgagaaagaggactgagaacatggacaaattcaaactgacgcgcggcgaaaaagcgtggattctgtacgatgtcggaaattccgcgttcatcctgctgatttccacggtcatcccgatctatttcaacgcgctggcctccgccgacggcatttccgacagcgattaccttgcagcgtggggctacgccggctccgtctccacgctgatcgtcgcgctttccgcgccgctgctcggcacgctggccgaccgccggaacatgaagccgatcctgttcactgcatcgctcgccctcggcgcgctcggctgcgcatgtctcggtctcgcttggggctggatgtcctttctcgtgatcttcgtcgtcgcgaaggtcggctactcctccgcaaacgtcttttacgatgcgatgctgcccgaaatcacgaccgaggcgcgtatggacaaggtctcctcgctcggctatgcctttggctacatcggaagctgcatcccgtttatcgtctcgatcgtgatcgtgctgttttacgagaagctcggcatttcccagcccaccgcgatgctgatcgcctttctgatcaccgccgtgtggtgggtcgtgctgacggtcccgctgcttcgaacctaccgccacaccgcctattccgaggcaagcggcgcgaagctctccgaaacgctgcgccggttcgtccgcaccttcaagaacatccgccgcgagaaacacattttcatttttatgctggcgttttttttcttcatcgacggcgtgtacacgatcatcgagatggcgacggcctacggcacagccgtggggctcgactcgaccggcctgctgctcgccttgcttttgacgcagctcgtcgcgttcccgttcgcaatcctgttcgggcggctctccgccaagtacagaaccggcctgctcatcaagatctgcgtcctcgcctacacgggtatcgcagttttcgcgatctttttgcagcaccagtggcagttctggacgctcgccgtcgcggtcggcatgtttcagggaggcattcaggcgctctcccgctcctattttgcaaagatcatcccggctgagaagagcggcgaatatttcggcctcttcgacatctgcggcaagggggcggcgtttctcggcacgctgatcgtcgccgtcgtcagtcagaccaccggcaacgagagcctcgccgtcggcgcgatcgcggtgatcttcgtgatcggctttgcgatcttctgctacgcggacaagctgaaccgcagccggaaataatccgatccactttctgttacatagaaaaacaggcgcggccccattcaaacggaggccgcgcctgttttattttgaggaaccccctgcgcctgcgcggcgcttccgcacggatcaggcttacgccggctgtgccttttccatcacatagtttgtcagcaaaacgccctgccgctcgacctgctgcgtccgaacgaccgtgtacccgcgcccctcaaaaaaaggccgcgcggtgatggacgcatgcgtgacgatctttcccggcgccgttcgctccatggcgtcgcagagcgctgccgcaaccccgcgccgctgataatccttgtggacgtacagccggtcaaggtagccggtttcgtcgatgtcgccgaagccggcgatcacgccgtccagctcggccacaaacgtattgtgcgccaaaaacgagcggttccacgccgcgaggtcgacatgcccggtcgcccacacatcgagctgcgcctgcgtgtagtcgcgcgcgttgacggtgtggaccgtgttgtaaaacagcgctgccagcgcggcgcagtcctttgattgataggctctgattcgcatatgttctcctttttccggcatatccgcggcgggcctccgctttccggtgaaaaagcgccctgctctccgcagagaacagggcgcggttttattcgtgctttgcttagctgtggaaggagtagttcggcgcttccttcgtaatttgaatgtcgtgcgggtggctttccttgaggccggcgccggtaatgcgcacaaactgcgccttctcgtgcatctcccgaatggttgcacagccggtgtagcccatgccggagcgcaggccgccgatcatctggtagatcgtgtcggcgagcggtcccttgaacgggacgcggccctcgacgccctcgggaacaaacttcttgttgttgccctggaagtagcggtcgctcgagcccttgcccatcgcgccgagcgagcccatgccgcggtacaccttgaactggcggccctgatacagctcgtattcgcccggggcctccttgcagcccgcgaccagcgagccgagcatgacgacgctcgcgccggcggcaagcgccttgacgatgtcgccgctgtacttgatgccgccgtccgcgatgatcggcacgccgtattccgccgcgacgcacgccgcgtcatacacggcggtgatctgcggcacgccgatgcccgcaaccacgcgcgtggtgcagatggagccgggaccgatgccgaccttgacgcagtctgcgccggcctcgatcagcgcgcgcgtgcccgcgccggtcgccacgttgcccgcgatgagctggagctccgggtacgcggccttgaccttccggacagcctcgatgatgccgctgttgtggccgtgcgccgagtcgagcacgacaacgtcaacctgcgcctcgacgagcgccgcaacgcgttcgagcacgtcggccgtcgcaccgatcgccgcgccgcaaagcaggcggccgccggcgtcgcgcgcggaattcgggtactgcacggccttttcaatatccttgatcgtgatgaggcccttgaggtagcccttttcatcgacgatcgggagcttttcgattctgtggcggcgaagaatttcctgtgcgtccagcatggtggtgccgaccggcgcggtgacaaggttttccttcgtcatgacgtcggcgatcttctggtcgaagtccttgtcggtcatgaagcggaggtcgcggttcgtgatgatgccgacgagcttgccgtcctgacagatcggcacgccggagatcttgtagcggcccatgaggctgtccgcctcgcgcaccgtgttgtccggcgcaaggtagaacggatcgacgataacgccgttttcggagcgcttgaccatatcgacaaggtctgcctgacgctcgatcgacatattcttgtgaatgatgccgacgccgccctcacgcgcgatcgcgatcgccatttccgcctcggtgacggtatccatcgccgctgtcataatcggggtattgagccggatcttctttgtgagctgcgtggaaatatccacctgcgcgggcagcacgtttgattctgcgggaatcagcagaacgtcgtcaaaggtcagcccctctttgacaaacttggaagtaaaatctgtgttcagcataaccgtcaaccatcctttcacttttcacgccgcttgtgattctttaaaggcgcatggccgtgccgcacagcctgcgccgttcttaatggattattgatattaaattttatcactttaacggcttcttttcaactggttcgtgcgatgaaaaacagagatatttttactcggttcttcctatcttcttaggaaaaagcgacaaaaagcgacattctgtccgcgtaaggcggacgcgcgcggacggccgcgcaatttgcgccggaaaaaacgcagaaaaatcttgacagtgcccccgctttgcgatacgctgtacctagaccaaacgggttgtattgaaaattcacaaaaggatgaaaacgcatgaaaaaatttcattttcccgccgtaacgccgcagaacagcgaggcgctgcggctcgccgtggtgcagggcaccttctgggcctcgatggccgtcggcggctaccagaccgtttacctgcagaacaacggctttcccgccgcgcagttcggccttctgaacgctattgcctgcgcggtcgcgattgtcgccatgaccttctggggcatggtgagcgaccgcatcggcggcgtgcgcaagatcgtcatgctgacgctttcgctcggcgtctctctcttcgcgctcatcccgctgatcccctccgggcagccgtactccgcgcttctctttctgatcatcatccccgtcgtgaacttcttccgcgcgccgatgtcggcatttgtggacaacatcacggtgcgcaactgtgccgaaaacagcctgaattacggcacgatccgcagcagcggctcgctgtggttcgcggtggcgggcatcctcgccgtcaatctcctgattccggcactcggcgtcggctccaccttctgggccgcggcgatcgtgatgattcccgcgatcgtgctcgtatttttctgccgcgagccgcagagcggcggccgcacgaagaaaagccgcatgggcacgggcgagctttttaagaaccgccgctttgtcaccttccttattttcggctttttcttctacgtgggcaccgctttcgagagcaacttcctgccctatctgatgacttcgatcgaaatcgacagcacgaacatcggccttgtgctctccgtgcgcgcgctgatggagatcccgttcctgtactttatcgtgaagctgcgccgccgcttccagctgcgctacctcatcatgctggcggccgttttcatgggtgtggaatgcctgctgctcggctttttcgtcacctcgctgccggaattcgtcgttttcgccgcattcttcggcctcggcaacgggctgttcctcggcacggcgaccaactacatttacgagatggcgccggtccacctgcgcgccacggcgcacggcctgttcgtctccgtctcgcagattgccggcattctcggcaacctgctcggcggcttcctgttcgacgcggtgggcggcaagccgttttacctgatcgccggcggcgtcatgtttctctccgtgctcgtctttgcgctcagctttaccctgaagcgccgcgaaaccgcacctgtcccagcggaatgagcgcagcagcacagactgcgccttggcagatccttttggggaaatcacgcgcgctgccccgcaaaatcgcggcgcggtcacctgaaaaccacccgaggcagggccactgaaaaacggcttcgcattccacggagcaatccgccgcttcagctcagaccggctgtctgtgaatctgagaacgaaactaaaatacaaccagcaattttttaaaggaaccggtcgatttgatcggttcctttttgcataggcactgctgccatggttctccacaagccatcgacaaattgtgaaaaacaagcgttttgccactataccgtgtgcttttcaacactttccaccgagttttccacagcaaatctcattcaatttatgaataattattcgtccaaaaagcaagattttttgcgcccttatttcctatctttacagtatattttctggattttcctgtaaatttgccataaaggccaagaaaatatgttttcacactatacaggaatcctgcataaaagaatgaccttcctgtattttccacatatccgcaggaaaagtttttcacaggacggggcggaaaatgcggaattttctgtccggcgccgttttttgccgctcgaaaggatatgaaaatgccgccgcggctgcaaaatgtacgcgtgcagctgcggcggcgttctgtttttatttcttcgggacaaggacgtccttgccgcccatgtatgggcgcagcgcctcggggatgcggacgctgccgtttgcctgcaggttgttctcgaggaacgcgatcagcatgcgcggcggggcgacgaccgtattgttcagcgtgtgcgcgaggtacttgccgtccggaccgttgacgcggatgcgcaggcggcgcgcctgtgcgtcgccgaggttcgagcagcttcccacctcgaaatacttctgctggcgcggcgaccaggcctcgacgtcgaccgatttgaccttgaggtccgcgaggtcgcccgagcagcactcgagcgtgcgcaccggaatgtccatgcttctgaacaggtcgaccgtgttctgccagagcttgtcgtaccactgcatcgattcctccggcttgcagacgacgatcatctcctgcttttcaaactggtggatgcggtacacgccgcgctcctcgatgccgtgcgcgcccttctccttgcggaagcacggcgagtagctcgtgagcgtcagcggcagctcggcttcgggcaggatctggtcgatgaacttgccgatcatcgagtgctcgctggtgccgacgaggtacagatcctcgccctcaatcttatacatcatggaatccatttccgcaaagctcatgacgccggtgacgacgtcgctgcggatcatgtacggcggaatcacatacgtgaagccgcggtcaatcataaaatcgcgcgcataggcgatgacggccgagtgcaggcgcgcgatgtcgcccatcaggtagtagaagccgttgccggcgacgcggcgcgcggcgtcgaggtcaatgccgttgaagcgctccatgatctcggtgtggtacggcaccgggaagtccggcacgaccggctcgccatagcgctggacctcaacgttttcgctgtcgtcgcggccgaccggcacactcgcatcgatgatattcgggatcgtcatcatgattttgaggatgcgctcgtcgagctccttctccttggcctccgccgcgagcagctcgtcggactgcgccttgacctgcgccttgacctgctcggccttctcgcgcttgccctgccccatcagcgcgccgatctgcttcgagagcttgttgcgcgaggcgcgcagaccgtcggccttctgctgtgtctgccgcttttcggcgtccagcccgatcacctcgtcgacgagcgggagcttcgaatcctgaaacttctttttgatgttttcgcggaccgcatccgggttttctctcagaaatttaatgtcgatcattgcttttcatcctttcggctttacttttcaatttttaatacctatataatcatccgtttccgctctcatagcgccggaggccgcgggagaacatccacaccggcaggacgaccatcagcgcggaaacgagaattccacagcagaacagcacaagcccgttgacggtcagctctccggacgtcggcgtcaggatgccgcacatcatcttgatcgtcgtcgacttgcccgcgccgttcggcccgatgtagccgacgacctccccggcgccgatgtcaaacgtgatgttgtcgaccgcgcgaaacacctccgccgatttcgaccgccgcagcttcagccagccggtctttttgaaggacttgtagtccttcgtcaaattgctgcaatgaatcattgcccgcatcccccctaacaaacacaccccaatcgcttttagtcctccagctttaaatcggagagcaggctttttaaatcctcctcgccgtagaattcaatggacagtacgccctttttctttgtgccgccgacatgcacaacgcggttcagcgtatcgcgcaaagcgagctccgcctcgtcgtagtagcggatgcggcgcgcgggacgcgttgtctcgggcttttccgcattggcccgtttggccattttttcgagctcgcgcacggaaagcccctccgccactgtgcgctttgccgccgcgagcatcgccgcctcatccttaaagctcaagagcgtgcgggcgtggccggccgtgaggtcgccgttggcgagcattgcgcgcagcacatccggcaggtttaaaagccgcagcgcgtttgtcaccgccgggcgggatttgcccacggtttttgagatttcatcctgcgtgaagctgaattcatccatcaaagcctgatagccctgtgcctcctcaagcggttttaagtcctcgcgctgcaaattttcgatcagcgcgatctgcatgacctcgctgtccgtcagttcgcggatcagcgcgggcacggtcataagccccgccatgcgcgaggcgcgccaccgccgctcccccgcgacgatctgatacccgcccgagagcatcgggcgcacgagaagcggctgcagaacgccgtgctgggcgatggaatccgcgagctcgcgcatcgcttcgtcgctgaattccttgcgcggctggttccggttcggctccagctcgttgatattcagctctaccgcgctgccgtcgtccgcgcgcacgttatcgtgaaaaatcgcgtcaagccccttgccgaggccgccttttttcgccatatctgaaatttatcctccttcaatcatcggtttttctttaaaatttcatccgtcagcgcgccgtaggccaagctgcccttattgctccggtcgtaatagaggatcggctggccgtagctcggcgcctcggaaaggcgcacggtgcggggaatcaccgtggaaaacaccttgcgcgggaaatacttcttgatttccgtcacgacctgctgcgtcaggttgagccggccgtcgtacattgtgagcagaacgccttcgagctccagccggtcgttgtagcgccgtttcacggcctgcacggtgttcatcagttgggaaagaccctcaagcgcatagtattcgcactgcacggggattaggacggagtccgcggcgttcagcgcgttcgtcgtaatcaggccgagtgacggcgggcagtcgataatgataaaatcgtacgcggcgcgcatcggcgccagcgcggttttcagcacggcctcgcgcgctggaatatccgcgagctcgatctccgccgcggcgagatccgccgaggacggaatgaccgacagcctatcaaatgcggttttcagcacggcgtcctgccctttcgcgccgttgatcaaaatatcgtaggaggtcgtctcgaggctgcgccggtcaaagcccacgccgctcgtcgaattgccctgcgggtcgatatccacaagcagcgtattttttccctttgcgccgaggcatgcggcaatatttaccgcgctcgtcgttttgcccacgccgcccttctgatttgcaacggcgatcactttgctcataattagccgtgctcctttcccttttccttggctgcgctcccttcgggtcgcatgtataatttattgtatcacaattcccacgcggaataaagtgcaaattcaaggtttttggcgattcggcaatgtttcacgtgaaacaacgcaaaaggaccgccggttttgccgacagtcctcctgcgttgtgggaaatgaataagggaatgggtttacctcgtactcgaatttgatttcgggatgcgcacgacgcactcaaaatagtcgtcggtctcccgcttctgggaaacagctcggatgccggcgcttttcatcgccttgaccgcatggtcgatcgtgttgatgaacagccggacgtccttcgcgataaaagtacgcttcggctttttcgccggttcctcccgctcgagcaaatccttgatcagcgcctcagtctgtgcgacgttgagtttgcgctccacgattgctttcagcgcctgcacgcggcggattgggtcttccacgcgcagaagcgcgcgggcgtggcgctctgtgagccggttttccagaataatccgctgctcctcgcccgaaaggcgcagaagccggaccttgtttgcaagggcgggctggctcatgccgagccgcctcgccgtctcctcctgtgtcatcgaccggtcgcgcatcaattcataaattgccgcggcctcttcaaaaaaattcaaatcactgcgctgcatattctcgatcagagcgagcaccgcgccgtctttcgcgctgtaatcctgcacgatggccggaatcgttctgagccccgccattttggatgcacgccagcgccgctcaccggccacgagtacgtagccgtcccggtctcgccggacgacgatcggctgcaaaagcccgttctgccggatgctttcggcgagctgctcgagctccgccttcggaaaatccttgcgcggctggttggggttgggcacaatcctgtccggagccagctccacgagctttttcctttcactgaaaaccaatccgcgtccccccttgccgatgacaccgcagggcttgtcctgccctgtgcacttagaataccacacgccgcgtacagattttgccggaatgtgtcacacaaaaaatttttcttgcttttgatcttttccatggtataatgaccgtaacaagccgcaaaaggggtgcgtaccaatgatttttccggagaaaaaagccgtgctgcgggacgggcggacctgcatgctgcgcagcgctgtgcccgcagacgccgaggagatgcgcgcttatctgaccgccacctccgccgaaacaccgttcctgctgcgcgggccgcaggacgatgtgccgagcaccgatgaggaacgcgccttcctgcaatcgtgcctcgaccagccgcgcgggctgatgctgacgatccgggtagacgggacgctcgccggaagctgccgcctgtctcctgaagggagcgccgcacgcagccgccaccgctgcggcgtggcgatcgcgctgtatcaggcctactgcggacttggcatcgggcggtatgcgctcgaaacgcttattgaagcggcaaagcgcattggctacgagcagatggagctgagcgtcgttcgcggcaacggccgcgcacagcagctgtatgaacggctgggctttcaggcctacggcctgcttccgcacgcaatgaaatacccggacggcagctacgccgatgaaatcctgatgatcaaattgctctgactgcgccgcggcgcaagatagcccgcgtgccgccaatcctcataaattgcaggaaaaaggaggcttccacaccggaaacctcctttttttgcgctcattgcccctaataatccttttacaggtatttcttaaagcccttgacctcgctgtaaccgatcgcatcgtagaacttgtgcgcgcctgtgcggttcatgccggagaccaaaatacagtagtggcattccttttctctgccccagttttcaataaattcaaacatgccgcgcccgatgccgcggccgcggtatgccttgtcggttacgacgttctcgacgagcagaatcggcctgcaggtatcgcagatgtcctcaaacgccacgccgagcagagagccgcagagcgccccgttttccgtgtcctccgccacaagcagaaagcagtcctcgttgcggtcgagcttttccattttccgcgccatctcggcggggttcgccatcgtctccgaaagctggctcaaaagtgggttcagcttcggaatatcgtcaattttcgcctttcgataccgtatattcatatatatttcgccctttatcggcaaaggacacgacctcctgcaaaatttttatttgtaccagataattgcaaatacatgcaaattgcaaatacttgcaaagcgcaaatatatccgctgcgtatggtattttcgccttgctatattccaaacatctaaaattcgctgctccgcacggctgctttactgcgtatccggcttttcgaggaacagcggctttttggtgatcgtcccgccgtggcgcggatagaccttcggtgtaaacgccgttttctgcatgacggcgatatttcgctcgctgtgctccgcatccggcagcgtaaacggcgctgtctttacgaccttgcagccgagcgcggacaccgcacgcttggcgagcgccatttcctcctcgagccccgggcctttcatcgccgcaaaaatacccttcatcttgatgagcgggatacagtattccgctagcgtgttcatattggcgaccgcgcgcgccgtcgcaatgtcgaagctctcgcgcagcttcacgtcgcgcccggcttcctccgcacgcttgtggatgcaattcgcctcaacgccgatcgcggcacagacgtctttcagaaatataaggcgcttattgagcgaatcgagcaacgtcagctcgatgtccggccgcatgattttgaccggcaggcccggaaaacccgcaccggtgcccacgtccacgagcttcgcgccttttttgatctccaccgcctttaaaagcgtcaggctgtccacaaaatgcttgacgaccgcctcatgcgggtcggtgatcgccgtcaggttgacgacctcgttccgctcgagcaggaggtccagatagatctgaaactgctccgcctgctggggggaaaccttcacgccgatttcctttgccttttgaatcaattcgtttcgtatatccatacggatgccctccgttttcttttttattgcgtgtccgccgtgctctccaattccgttcggcgctgctgcgcctcattcccggcggaaagccaaatcagaagcaccgaaatatccgccggcgatacgccggagatgcgtccggcctgcccgatattttccggccgcacacggctgagcttttcgcgcgcctcgaggcgcaggccggctatggaatcgtaatcgatgccgcggggcagaagccgcttttcgaggcggcgcatttctgtaatatcctgcatctgccgcttgatgtacccctcatatttgagcgcggtttccacgctttcaaatatttcgcgcgggtaatccggccgcgttttatctacggggcacagatccgcatacgaaatctgcgggcggcgcagcagctcggaaagccgcacaccggtcgaaaccggcgatgtttcacgtgaaacaaggatatcgttcagcgcctgcgtcggcgaaagcacggtcttttccgcgcgtttcatttcctccgccttctgcgcctgtttcttctgaaatttcgcccagcgcgcatcggaaatcagtccaagcgagcgcccgatcggggtcagccgctcatcagcgttgtcctgccggagtacaaggcggtattccgagcgcgaggtcatcatgcggtaggggtcggtcacgccctttgtgatcagatcgtcgatcagcgtgccgatgtacgagctcgcgcggtcgagcagcagcggcgcacgcccgaggatttttagcgcggcattcacacctgcgacaaagccctgcgcggccgcctcctcgtagccggaactgccgttgaactgcccggcgccgtagagccccggcagctcgcggaattcgagcgtggaggtcagctgcagcggatcgcagcaatcgtactcgatcgcgtaggcgctgcgcatgatctgcacgtgctcgagcccctgaatcgtccggtaaaaggcgatctgcacgtcctcgggcagagaagaactcatgccctgcaaatacatttcctccgtgtccgcgccgcacggctcaataaagagctggtggcgcggcttttcagcaaagcgcacgatcttgtcctctatactcgggcagtagcgcgggccgacgccctcgatcatgccgccgtacaagggcgaacggtggatgttctccaaaatcaccgccttcgtctgcgcgttcgtccagctcacatgacacaccgccttgttttggggcggggtttccgtatcaaacgaaaacggcgtaaccggctcgtcgccgttctgtacctccagcgccgaaaagtcgatcgaagagcgcagaacgcgcgccggcgtccccgtcttgaagcgccgcagggcaatgccgagttttttcagcgcttccgagagcgccgtagccgggaacataccgtccggcccgcccgcataggagacgtcgccgacgaaaatgcgcccgccaaggaaggtgcccgtcgcgaggaccaccgccttgcaggcatactgtgcgccaagctgggtcgtcaaaatccagtggtccgccgcgcgctgcaaatcgaccacctcggcctgcttcatctctaggttcgggcagagctccagcttgtgcttcatcacgcgggcgtattggttccggtcgatctgcgcgcgcagggagtgcacggccggccccttgccgaggttcagcatgcggctctgcaacgtgcatgcgtccgccgtcttgcccatttcgccgccgagcgcatcgatctcccgcacaagatggccctttgccgtgccgccgatgctcgggttgcaggggcagttgcccaccgcatccatgttgatcgtaaacaccgccgtacggcacccgagccgcgccgccgcgagcgcggcctcaatgcccgcgtgccccgcgccgatcacggcaatatccaattttccagcatcataaatcatagttgttttccttagattttttcaagtaatcgcatgggttccgcatctcattttccgacgcagaatttctcaaacacgcggtcgacgaccgcatcggagacgcgctcgccggtcagctcgttcagcgccgcgacagcgccctcaagcgaaacggtcacggcgtcccatgtcatgccgaggcgcagggcgttttccgcctcctcaatgcaggcgagcgccgctttcgcatccgcgcgctggcgctccgtatagaggatgccgtcgttcgggttcagcgccgccgtctgaagcacctcggccgcagcctgtgccagcgcggagaggccgtcgccagaaagcgcggaaaccgtcacgaccgccgggaagcgcgcctcaatctccgccatatcgatggcggcgggcagatcggatttattgacgaccgccacgcatggcgtgtcgccgatcgcctccatcatcgcgcggtcgtcgtcgttcagcgcttcgctcgcgtcaaacaccgcgagcacaaactgcgccgttttgacgcgctccagcgcgatctgcacgccaatcctttcgacgcggtcctccgtttcccggataccggccgtatccgcgaggcgcagcgggatttcgccgagcaggaccgtttcctccacgacgtcgcgcgtcgtgcccgcgagatcggtcacgatcgagcgctcgcagcccgcgagcaaattcatcagcgtcgatttcccggcattcggcttgccggcaatcacggtcacgacgccctcgcgcagaacgcggccgccgtcaaagctgacgacaagcgcttccagcgcctcccgcccggcggccagcctttctttcaacattttctcgtctacctgtggaatatcgtcgtccggatagtccgcccacgccgcgaggtgcgcgccgacatcggtcaaatcggcgcgaatcgccgcgatccgccgggaaagcgcgccgccgtgtccagcctgcgcggccttcattgcctcacggccctgcgcggagatcagctccatcacggcctccgcctgcgcgagatccatcttgccgttcaaaaacgcccgtcgcgtaaattctccgggcgccgccggagaagcccccgccgcaagcaccgcctgcaacgccgttttcagaatgaaaaggccgccgtggcaggagagctcgacgacgtcctcgccggtgaagctcttcggcgaggcgaaaaccgtcgcaatacattcgtccagccgcgcgccgctttcatctattacatagccaaagcggcacgtatacccggccgcctgcatgaggctctcgccggatgcggcccggaatacccggtcgccgaccgcgcgcgcttcggggccggagatccggataatcccgatgccgcccggcgcggccgccgtagaaattgctgcgatcgttttcatttctttacctcttatataaaatataaatttattttcttcggggaacaagccatatcagccgcacaagggcatagaagctacggccggccgcgtgaaaatttccgtctccagagaccgtcccacggaggctccgcccaaccgttgaactttgcctgcgcgcctctcggtcctgtatcaccgacctgtatcccctgcggaagcccgcgtcaatcgcagcccttccgcttctgttttccggcgcggcggcgcacagcgatataagccgccgcccaaagcacggcgatcagaagcatgaacagcgtgcgcaccaaaagccccgtataccaaggcgcagaatccgccgcataaagcgctcggaaacgaaaataagactgtatatcgccgaacgcaaggccgatatatgcgccggtcagcacgccgatcccgatttccagcacgcgtttaagccttttcatgcgccgtcagccccctttattttctgattatagcacgcgccgcaccgtttcgccacccctgatttcggcaaaaaagaagaacctcacgcggaggctcttccgaaaactcacttcttttcgattttgccgtatggcgttgttacgtcgtccagcacgcggggcgccgccgtctgtgcgggcgccgggcgggctgagcggctgtccctgcggggcggtctgccgccgcggttgtccctgttgtagcccggcttgccgccccggtttccgccgcggcggttgtcgcgcttctggaagcgctcgccgccctcggggccgatcacgacatggcgggcgaggtcctcgccctcgctccaggatttcgcgccctccacggtctgcacggccgtgtggatgatgcggcgctcatacgggttcatcggctcgagcgacgcgttgcgcccggtttttacggcgcgggccgccatcttcttgccgaggttttcgagcgtctccttgcgcttttcgcggtagttgccgacgtccagcgtcacgcggtagtacgactcgtccacatggttcgccacgagggaggagaggtactggagcgcatcgagcgtctcgccgcggtggccgatgataaagccgatatcctcgccggtcagaaccagctccgcgccggcctcgacctcgtggatctcgacctcgatgtccgtcagccccataccgctgagaatggaacgcaggtacgctgccgccgcatcggccggcgtctcgcggataaacgcgcgcaccttcgcggggctgccgccgaacaggccgaagcgctttttctccggcagctcgagaatttcaaattccgcctctgtcgtgtccacgccgagctgcgcgcacgcgttggcatgcgcctcttcaaccgttgcgcccgttgcaattgcttcttttaccattgctttttacatcctttcgattttcaatacaagctatcgtttatcccgtttcggagtgaaaggaggtgggatagtcggctgattatttcctgcttcccatataatcggaagcagagcccttatttttctgcccgccggactttttcccgccggattttttactctgctggttcgcctgccggctggcctgcgcctgatttttcgcctcgatcttatcggcaatctgcttttgaatgttcgccggcagcgggctgatcttctgctcggctgcgagcagcgtcacgtagcggctcgcctcggaatgcgcggaaacctgctccgccgaataatacttgtgctggatgatggactgcgcaaagccgacgagcgcggaaacgatccaatagaagccgacggcgccgggcatgatgaacgcccagtacgcggagagcagcggcatgccgtacagcatcaccttcatgcagccgccgcccgaggcctgctgctgcggctgcagcttctgcatgatgaacgtctggccccagtacgtgatgagcgccagcaccgggatgatccacatcatcgacgcaaaggaagaggcattcggcgaggcgagcaggtcgagacccgcaaacttaaagccgtggctgaacgactcgatcttcgccatatcctccggcgagaacatcgtcaggtattccttcagcgcggagaagttcttgacgatctcaagctcgacatactggctcgtgctcgagatgccggggatgcgcgtgacgaattcggtcgccttcgcaatcgaatcgctcgcgacgtgcagcgtattcgaaagcgggtagataacggagtagtaaatgccgagcatgatcggcagcgggagcagcgttgtcaggcatccgccgccggggttgacgccctccttctcatacagcttctgcagctcctcgttgtatttcatcttatcgctgccgtagcgcgcctgcagctccttctgcttggccgccatgcgcgactgcgccgccatgcttttctgcgacttgatcgagaaagggaacatcagcgccttgacaatgatcgtaaacaggataatcgccacgccgtagttctggaaaatcgtgtagaggaaccacaagaggtagccgaatatgctgccaaagaaattaaaaaactgcatcatagttttgaatcaaatccttcccggatcaaaccttgttctttttttcgggtacgggatcgtagccgccccttgaaaacgggttgcagcgcagaatgcgccacagtgcgagcaggccgcccttcagcgcgccgaagcgctccactgcctcaagcccgtactgcgagcaggtgggtatgtatttgcagcagccccgcgtgctgctcggccgcagcctctggtacagccggatcaggccgagcagcgcgtttttcggtgtaagccgcgtcatagcctatccggccccgcgggcttgtccctcttttttcctgcacaaacaagcacgccgagttcctccagcgcgcttgtcatttccgccaatactgccccgcagtgcacaaacggcgttttcccgcgcgacaccagcacaatatcgaaccccggcctgatgcgggggtacagcgtgcgcacgctctcgcgcagcagccgccgggcgcggttccgtttgaccgcattgccgatttttttgcttgccgtaattccgatgcgcggcgccgcgccgccttttctgatgcagtacgcgacgagcgaggggcgcaccgcgctttttccgcgggcatagacgcgccggaattcataattctccgtcaggggtacgatgatatccataaagctcccaaaaacctgcgcggtattttccgccgcacctgcaaaacaaagaaaggccacacgccggtgaccttcaaagcatacatcaatacgttaagcgtgctctgccctttgctctgcgacgcgccaggaccttgcgtccgttgcgtgtagacattctctttctgaagccgtgctccttctttctgtggagcttcttcggctgataggttctcagcatatcaaaaaccctcctttcgcgaggttactttgcaaaacccgaatcgtacagtcggttacagttaagcattataccttaaaaccttagaatctgtcaaccttttttccggtttttcaggaaaaaaacatgcacgaaaaattgcccgcccatattctgcgcccgtctttttcaaaaccacagaatatagatgcagaaaaggcgcggggcccgcatatcaaaaaacgcgcatccgccccgcctgcgcagccaaaattttcccggccggattttcaacatttcggcgcattttctgtggacaacgcaaccggtttatgctacactatatattagtattttatcgtcaaaatgcagaagtgccgcctttttccggcttttccggccgaaagcgcgccgcttctgccgcggtatactgcgctaccgagaacacgtgagaaagggaaaacaggaaatggaatcgttttttgaagcatgggacctgatctgcgattactgcagaaatcaggtcaccgaggtgagctacgaaacctggttcagcaagctcgtaccggtttcgctggactttgaggagggcgtcgccatcattcaggcgccgaatgaatttcacaaatcgacgattgagcgcggctttcacaaatatctcaacgacgcgattcagagcgtgttcggcccggccatcacctacaagctgatcacgccgatggagaaaaaggagaagaaggccgtcgaggaggacgacgaatacgagtacaccttcgagacgttcatcgagggcagctcgaataaattcgcctgcgccgcctgccgctacgtggcgaaggagccggcgaaaaattacaacccgctctttatctacggtaactccggcctcggcaaaacgcacctgctcaacgcggtcggccacgagctgaaaaagaatttcagcgagaagaacatcatctacgtcaagggcgaccagtttgcaaacgagctgatcgaggccatccgcgccggcaccacggcgggcttccgcgaaaaataccgcaaggccgacgcgcttttaatcgacgatattcagttcatcgccggcaaagaatcgacgcaggaggaatttttccatacctttaatacgctttatgaatcgaagaaacagatcgtgctgacgagcgaccggccgccgcgcgacattgcaacgctcgaggaccgcctcaagacgcgcttcgagtggggccttacggccgacgtgcagccgccggattttgagacgcgcatggcgatcatcaagcgcaaggccgagcttgtcggcctgaacgtgccggacagcgtctgtgaattcatcgcggtcaagctcaaaagcaacatccgccagctcgagggcaccgtcaaaaagctcaaggcaatccacctcgtcgagggcgcgacgccgacgatcaacaccgcacagcgcgcgatcagcgacatcgtaaacaacgaccagccgacacccgtcacggtcggcaagatcatcgaggaggtcgcccgcacctacggcgtttcccccgaagacatcaagtcctcaaagcgcaacgcgaacatctccttcgcgcgccagatctccatgtacatcgtccgcgaaatcacgcagatgcccatggtcgagatcggcaaagagttcggcggccgcgaccactccacagtcgtctacgcaatccagcagatcgaggaaaaatccctcaaggacccggtcacaaaagcgacggtcggcgacatcatcaagaacatccgcgaccgttaaatacctgtgaacaggttttgccgcgcaaaccgttttccaccgatccataaacaaattttcaacatttcacacagagttttcaaccgctttgtggaatgaaaaataccttccacattgtccacatttcttccacagggaattttttaaaacttttccgccgtttttggcttcacaaagccgattttccaaatttccaacaatttaacaccccctacggctactgctaaatatattactaagagtaataaagaaataaggagggaagccccccgccctcctctcatgcagccgaaccgcaagcatcctgcaaaatgcaaacaaaaggagatgcaaaaaatgaaattcaccatagaaaagcgcattttaaccgaagccgtcggaaacctgcagcgcgcggtctccgcgaaaacctcaattcccgcgctcgagggcattttgatccgcagcggcgaggaaaaactcatcctctccgcctacgacctcgaaatcggcatgcagacagagctgcccgccgttatttccgaatccggcgctatcattttaactgcgaaactattctctgaaatcgtccgtaagtcaccggccgacgacatcacaatcgaaaccgacgaccgcaacaccgcgacaattacctcgggcgtgagctgtttcacaatcatcggcatgaacgccgcagaattcccagaatttccgaaagtcaccgacaccgatacactccgcctgcccgccggcgtgctgaaaagcatgatccgccagacactgttcgccgtcgcggactcgaatgcaaaaccgatccatcagggcagcctgttcaaaatcgaaaaccgcacgctcgacgtcgtttccgtggacggttaccggctggcactgcgccacgaggcaattccgttcgacggcagcctcgaatttgtcgttcccggaaagacactcggcgaggtgctgaagctgctgcgcgacgatgacggcgagatcgaaatctgcccgagccgccggcacatcctcttcaaaatcgataattataccgtgctttccgctttgctcgagggcgaattcctcgattatcgcgcggcgctgccgaaagataaaaaaaccgaagctgtcgtctccacgcggacactaatcgaaagcgtcgagcgcgtttcgcttcttattaccgaccgcctcaaaagcccggtgcggtgtgttctcggcgaggacacaattaaactgctctgctccacaacgatgggccgcgcaaacgaccaaatcgaggcgaagatctccggcgacccgctcgagatcggcttcaacaataaatatctgctcgacgcgctgcgtgccgcagaatgcgacgaagtgcgcatggaactcggcgggccgatcagcccgatgctcatcctgccgaaagagggcgatgcgttttcgttcctcgttctgccggtgcgcctgcgcagcgaaatttaaaaaaatgtttcacgcgatgtctttcgtgggaggacgctgcgtgaaacacagcagataaagtacaacagaggaaggattccatgaacgaaacgattcagatcacgacagaattcatccggctcgacgcgcttttaaaactcggcggcgcgctcgataccggcgggcaggcgaaattcgtcatacagaacggcgaggtgctcgtaaacggcgcggtctgcacaatgcgcggaaaaaaaatgcgcggcggcgattttgccgagtacaacggcgtgcgctacatcgtgcagaccgcggagggctgaagccttgaacgtcacgcgcctcggcttcgagcaattcagaaaccttgaaaacggggagattttcccgtgcgagacgatcaacgttattttcggcagcaacgcgcaggggaaaacgaatctccttgaggctgtctggctttttaccggcggacactcgttccgcggcacgaaggacggcgagctgccccgcctgacgaacgggagaaacgcggattccgccgcgctttcgatggatcttttcacggaagggcgcgagcagaacctgcgcctcctgttcaaaagcgggcggcgctccagcgtgatcaacggcgttgaaaaaaagacgggctcggcgctcgtcggcaaattctgtgctgtgatcttttccccggagcaccttttgctcgtcaaggagggccccgcgcggcggcgcgcgtttatcgacggtgcgctgtgtcaggcgaagcctgcgtttgcccgcgtgctcacaaattacaataaggcgctgcagcagcgcaatgcgcttttaaaggacatcgtgcgccacccggaattgcaggatacgctcgacgtctgggacgagcggctgctgcttttcggcacgcaggtcacgctcgagcgcatcgcgttctgccgggcgctcgcgccgaaggctgtggaaatctacagcggcatcgcgaaggcgcgcgaaagcgtctccttttcctacgccccattccgcggcgccgatacgcaggaggcggtttccgccgcgttttttgcggcgcttcggggcaaccgcgaggcggatatccgcgcgggcttcacctcggccggcccgcatcgggacgacctgtcgatcgagatcgacggcctctccgcgcggacgtacggctcgcaggggcagcagcgcagcatcgtgctggcgctcaagctcgcggaagccgacatcctgttcgaaaaaaccggcgagcggcccgtcatcctcctcgacgatgtgatgagcgagctcgatatgagccggcgggattatcttttgaaccatctcgacgggcggcaggtctttatcacctgctgcgacccggagactgtgcgcctgatggagcgcggccgcggctttcaggtagaaagcggtgtgctgaaaaattaagaaaacggttatattccatgtctgtacgccgggcgggttttatgctataattatggcacaataaagccggaagggctttgcggcaaagcgcgtcgttctttgcatctgcgatgcggcgcttcaaggagggatcgcgtgtatattcatcttggcctcggcgtcgtggtgcgcgaggaggacgtgatcggcattttcgacctcgagaatacgacggtttccaagacgacgcgcgattttttaaagtgcgccgaggcggaaaacctcgtggaggacgtgtgctatgacctgccgcgctccattgttgtgtgccgtgattttgtgtgcggcaggcgcgtgtatatcacgcagatcgcgccggcgacgcttttgaagcgctcgcgggcggaaatcggcggtttcccgttcatgcggccggccgccggaaagcagaaataactaggaaaggaaatccggttctatgcagtattttggtattccgacgtgtccgtattgcagaaagcgcgtcaatctggtccgcacgtggaagctgaagcgcgagggcgagtataagtgcccgcgctgcggcggcatttcgaatgtgtatctttccccgcttgtctacgtgttttccgtgcttgcgatctgcgccggcgtctgtatctatttctttcacaaattcgtgctcgacgacatcgggctgtttatctgtctgtatgtgttcatcccgtttgcgctttttttccttttgagtcttttcacggtatacctcaaaaagccggtaattaagcgcgtgcagcgcccggtgcaggagaaccgccggcagacggcgcagcgccgccctgcgcaggaaaaggcggacaccttctccgaaatcgataccggccgctacgaggaacccggcgcgccggaggaccggacgtaaaacaaaaatgagaaagcctgtttttgaacgggctttttttgcgtttaaacgcagaaaagtgcggtttggcacaaaattgcggagcggatggcggcaatcgggaaagccgcgcggaagcggcgctttttttattctcaaattcagggggaaaccttgtaaaggggcggcagatatggtatactatatataaaggtaaccatgcggacaagaaaggataatgagcgcacagatggatatcaatgaaatgactcatgtagatacgaattacggctcggaccaaattcaggttctcgaggggctggaggctgtccggaagcgcccgggcatgtacatcggctccacggggccgcgcggcctgcaccacctcgtctatgagattgtggacaatgcgatcgacgaggcgcttgccggttactgcgaccgcatcgacgtcaagattttgccgggcgacatcatctacgtccgggataacgggcgcggcgtgccggtcggcgtgcagcagcagaccggcctgccggctgtcacagtcgtttacacgatcctgcacgcgggcggcaagttcggcggcggcagctataaggtttccggcggcctgcacggcgtcggcgcctcggtcgtcaacgccctgtccacatggctggaggtcgaggtgcggcagaacgggcggctgtaccgccagcgcttcgagcgcggcagcgccgtctacgatctaaaggatgccggcccgcttgaaaacccggaggaaaccggcacgacagtgcgctttcaggctgatccggaaattttcaaggagacgacggtctatgagttccagacgctggagacgcgcctgcgcgagcaagcgttcctgaatgcgggcgtaaacatcgttttgaccgacgagcgtgacccggaaaatctcaggagcgagcagttccattatgagggcggtgtttcgagctttgtcgagtacctgaaccgcagcaaggagaaaatccacccggagccgatctatttcgcagccacagcggcggacgataacgccacctgtgaaatcgccatgcagtatacggacagcttcaacgagttcatcctctctttcgcgaacaacatccacacggtggacggcggcacacacgaggacggctttaagcgcgcgctgacgcgcattatgaacgaatacgcgagaaagtacaatattctgaaggaagccgacaaaaaactgtccggcgaggacgtgcgcgagggtctgacctgcgtcatcagcgtcaaggtcaaggaggcgcagtttgagggccagacaaagggcaagctcggcaacactgaaatcggcggccttgtcagctccatggtggccgataagctgacgaccttcctcgaggaaaatccggcggttgcccgcgcgatcttcgacaaggcgatggcggcctcccgcgccagagaggcggcccgcaaggcccgcgacctcgtgcggcgcaagtcggcgctcgaaagtgccacgctgcccggcaagcttgcggactgccagtccagaaatccggaggaaaccgagatctatatcgtcgagggcgattccgcaggcggctccgcaaaaggcggccgcgaccggaaatttcaggcgattctcccgctttggggcaagatgctgaatgtcgaaaaggcgcgcctcgaccgcgtgtacggcaacgataagctgatgccggtcatcaccgcgctcggcaccggtatcggcgaggaatttgaccttacaaagctgcggtacggccgtgttatcatcatggccgatgccgacgtcgacggctcgcatatccgcacgctgctgctcacattcttttatcgctatatgcgcccgctcgtcgaggccgggcacgtctatatcgcgcagccgccgctgttccgcgtaacgaaaaacaagcggcattattacgcgtattccgacgcggagcgcgacagcatcatggcagagctgcaggcgggctacgacatccagcgctataagggcctcggcgaaatggactccgagcagctctgggagacgacgatgaacccggatacgcgcgtcatgctgcaggttacgccgagcgacgccgcgcaggccgacgaggtctttaccattttgatgggcgataaggtcgagccgcgccgtgagttcatcgagaaaaacgcaaaatacgtcaagaatctggatatataagcgcgaaaggacacaaagccaatggatcatactgaagaaacaagggaaaacctcatacaggttgacctcagaaaaatcatggaggattccttcctcgattattccatgtccgtcatcgtgtcccgtgcgctgcccgacgtgcgcgacggcttgaagccggtgcaccgccgcatcctgtacacgatgtatgaaaacagcctgtggccggaaaaggcgtacagaaagtgcgccgatacggtcggcgccgtgctcggccgctatcacccgcacggcgacgtttcggtttacgacgcgctcgtgcgcctcgcgcaggatttctccatgcgctacatgctcgtggatggccacggcaacttcggctccgtggacggcgaccccgccgccgcctaccgatataccgaggcgagaatggcaaagctctctgtcgaaatgctgcgggacatcgacaaggataccgtcgatttcgaaccgaactacgacgaccgcctgaaggagccgtgcgttctgccctcgcattttccgaatatcctcgtcaatggctcgacaggcatcgcggtcggcatggcgacgaatatccccccgcacaatatgggcgaggtgctcgacggcgtctgcgcgatggtcgatgacccggacatcacgctcgagggcctgatgcagtacatcaaggggccggatttcccgacaggcggtatcatcatgggccgctcgggcatccgcgccgcctacgccacgggccgcggcaaaatccacgtgcgcgcccgcgcggagatcgtcgaaaagccgaacggccggttccaaatcgtcgtctccgagctgccgtatcaggtcaataaggcgcgcctgattgaaagtatcgccgatctcgtcaaggaaaagcgccttgacggcatctcgaatatcgacgaccattcggacagaaacggcatgcacatcgtcatcgacgtaaagcgcgacgcctcgccgcagatcgtcctgaacaacctgtattcgttcacgcagatgcagatcaccttcggcgtgatcatgctcgcaatcgtcgacgggcagccgcgcacgctcaccctaaagcagattctggaggaatatatccggttccagagcgaggtcgtgctgcgccgcacgcagtttgatttgaaaaaggcgcaggagcgcgcgcatattctcgacggcctcatgatcgcgctcgatttcatcgacgaggtcatcgcgattctgagaagctcgaaatcgattcccgagggcaaggaagcgctgatgacgcgtttcggcctcgacgacgtgcaggcgcaggccatcgtgcagatgcgcctcggccagctcaccggcctcgagcgcacgaagattgaggaggagcttgccgccctgcgcctcaagatcgccgattatatcgatattgtcggcagcgaggcgcgccggttcggcatcatcaaggacgaagcgctcgaaatgaagaagaagttcagcgatgagcgccgcacggagatcgcggcaatcagcggcgagatggatatcgaggatctgatcccgaacgagggctgcgtcatcacgctgacgaatttcggctacgcgaagcgccagacgctcgacacgtaccgcacgcagcgccgcggcggccgcggcatttccggcatgacgcgccgcgacgaggacatcgtgaccgagctgttcactgcgaacagccacgattacgtgctgttcttctccgaccgcggccgcgtttaccggctcaagtgctacgaggtgccggaaggctcgagaacgagccgcggcatcaacatcgccaacctgctgccgctgcagcccgaggagagaatcacctcgatgatccgcgtcgaggcattcgacgacgagcgctacctcgtaatggtcacgaaaaacgcggtcatcaagcgcgtcagcctcgcggcgttctcgaatgtgcgcaaaaatggcctgatcgcgatcgacctcgccgaggacgatgtgctgagctgggtgcgcatcacgagcggcaaggatgatctgctcgtcgcgacgaagcacggcaaggcgattcgattccacgaggacgacgtccgcgaaatgggccggcaggcccgcggtgtccgtgcgatccgcctgctcggcgacgatgtggtcgtcggcatgagcgtcctgcgcgaggaagggctcgtactcacggtttccgaaaccggctacggccgcatctcggagatcggcgactaccgcctgcagcgccgcggcggcaagggcatcctgaactaccacgtcgaaaaatacggcgatgtggcggcgatcaaggtggtcgacctcgacgacgacatcattctgatctccgatgacggcataatcatccgcatcgaggcgcagtccgtgcgcatctgcgcgcgcccgagcaaaggcgtccgcgtgatgaagctcgcggagggcagccgtgtgatcacgatggcccgcgcgccgcacgacgaggacgaagaaatttccgccgtagaggacgacggcaccgccgaggagggcatggccgaagatcccgcagcggaggatgaaacggaagaaacctccgaagaataattgattttgtggagactgcgttttctttgcgaaggcgcagtctttttcttgccaattcaccggtttcgtggtatgatgcagtcaattcgcagaaaaatctgcattttgggaggattgattattggtatgaaagatttttttggacgcggcaggccgcttgccattgccatgtgggatttttcgtggctggagcgcaggggcccgggagaaggctttgaggattgggacaaggcggtttcagagcttgtcgagcgcggctacgacgccgtgcgcatcgatccctatccccagctgatcgcgctcagcgatacgggcagctttgcgctcgacccggtctgggaggcgtgcggctggggctcgataaagccgattacggtctcgaatgtgctcgaaaatctgctcgaatttctgcgcgtctgccaaaagcacggcgttttggtcggcctttcgggctggttccggcacaaggaaagcgattcgtacgtttcgaagctgaaaatgccggaggacttcgcgcagatctggatcgacctgctgcgcaagatcgaaagcgccggcctgtacgatacgattttgtacgtcgatttctgcaacgagttcccgaactggctggactgtgcgccgaagggcgaaaacggcgccccgctgccgcgcgactcggctgagacgaccgcgtggtccaaccgctgcatagaggcctttaaggcggtttttccgcagatgcccgtcacgttctcgatctcctcggaattctacagaatggagcgcgaggactacggtaaatgggattttttggagccgcatatctggatgaacagcgacggcgacggccggtttgatttcacgctccgccgtgagggccgcatctacgacgggcaggatttccgcgagggcatggcggcctcgaaggcgctttacgaggaaagccccgaatactggaagatggtgctccgcacgcagatcgcgcattttgcgtcgtttgcgcgcagcagggacatcccgctcgtcacgacggagtgctgggcgatcgtgttttacaacgaatgcgggctcgactgggcgtggatgaaggagctctgcgaggtcggcgtgcaggaggccgtgaaaactggctgctgggcggcgatcggcacgagcaatttctgcgcgccgcagttccccggcatgtgggcggacgtcgcatggcaccgcgcgctgaccgactgcatacacggaaaagccgaatgaaaagagggagctgcaccgcggtgcagctccccttttttcggcagattttaagaaaatctccgccggttctgttatttctttctctccggcgcagcgccgggcagcatcattgcgccgtgtccgcagcagtaggtgtaagcctgcgggctgaattttttttgcaggccgaggcgctcctcggtcgccatcttggaatcgaggttgacgctcgtcagaaggtacggcgcgagcttgttgaactccgcctgttcctttgaaaagcccgcgatattgacgacgatgtcgccgctgaaaacgatcttgtttttttcgtctacaatcgcgatttcccccttcgagtgcccgccgttgcccgcatagatgtcgagcttcaggccgtggaattccagcggggcgatatatgcaatggggcccgcttccttcggctcaccgagcgcgcggatcgtgttcatctgcggcggacagtaccgcgtcaagagcttgctgatgcggctgtacggcgcgtgcagcttgttctgctcgcggaagttcggcaggctgttgttctcgagcgcaaagttgagccggccttcgttgctgacgtacacgtccggaaacaggtgaaggaggccgcagtggtcgatgtccgggtgcgtcgggatgatcgccttttccatgcggtcgaaatccgggaacaggccgtaaaggatcttcatcatctcgggcgcatagcaggcgaagccgcagtcgatgaagagcagcgcgccgtccttttccagaatgtacgtgttgctgccgcagggcggctcgatcatgtgcagcgtccagccgtccgaaagcgtgcggcggtaggtttcagcgcagaaattatcgcccttaaagcgcttgagcatctccgcaaaccggctgatataggaaaaagtccggtacggggccgtgccgcggtcgtcgagcagctgcataatcaggttggagtcggcgatcagcgcgctctgcgcgcttttgtcgagattcagaagtgctgtgagctggctcgcaaaggagaggtaaaacaccgtgttgtcgagcattttctgacttttgtcgtaattcaaaacgcggattgagcagagcttcgcggcttcgtcgagaaatttcttgatcttgtccggctccttaaaatggatggcgattttaaaggtctggtccgcgtcgtcgctgccctggccgttgatatacgggatgttgaagtggtagctctcgacgagctccagcaccggcaaaagggcgctcggcacattcggcagcttgaactcaagcagaatggtctggcccggcgaggcattgtccgagatatagccgatggcgcggagcgcttcggaaatttctgtgagctgttcatctgtcgcggacacctcgatgaaaagcatatgcaggtcgatcgccttgttgtagctgacgcgcgtgatgttgccgccggcctgcgcgatgatccggctggccttcaaaaaggcgccggccttatcggggatctgtgtgataaatgtttttttcatagatttccgtcggctcccaatacaattttctgttccatgattatacataccacatttcggcccgtttggcaatgcctgcgcggcctgcggcgttatttttctgccgcctcaagctgccgcgtgataaagagcggcacctcctcggggagaatatgcagcacaaaggcgaattcctcgtgcagcagcttttgcgcgcgctcgagcagctgctcgtcggccgcgtggaatttcctgccggtggatttgagcgattcgcggtgcaggtacagggtgcggatcaaaagggcaagctgcctgcggtcgctgccggcgaggatctccccgtagcgctcgcggcgcagagcgtcgttttcgatccagccgagcgattcgcccgcgagggagtcgatcagcgcgcggatctccgccgccgacaggatgcgccgcattttcccgaccagctttccgtttgcgcacggcacataaacggtggatttcccgtcgtacacgggcttcagcgcatagtaccgcagcttttcttttccgaccgttttctcgcagatctccgtgacggtgcacacgctctggcttccgtacaaaaccgtatcgtttacctgaaccatttcgcttacccctttctgaaataaaagtggttttctcgcaacaggacttacgttttgcgagaaaaccacacgttgtatagttttattatagcacatttcggggcaaaattcaaataaagatttcgggcgcgttctgccttctgcgcgggcgttttcttctcgcagccgggcgcgcgggaagctgtcagagccttccactttcgacgagcgccgctgtttttaaaatgccgacctgcgttttggaatcgggaatttcgttgtttagaaccatttccacggcttttttcagcgggatgcgctcgacctcgagaaattcgtcctcatcgagatgcatttcccctttttcagccacacggcaggcccaaatgcggatgatctcgccgcagtagcccggcgagggatagagattcccgagcgaaatatagttttcgccggcggtgccggtctcctccatctgctcgcgcttcacggcctcgaaggggtcctcccctttttcgagctttcctgcaggcagctcgagcagcacctccttatacgggtagcggaactgccggacgagcagcagctcgtccttttcggtcagcgccgcgacgcacacgccgccgttgtggcagacgacctcgcgctttgcggttttcccgttttcaagctccacctcgtcgagcagaacccggatgatgcggccttcaaattttgtatcgctggagagcgtcttttcatagagcttcatcgcacttttcctttctgtgcggctgttgccgcagcctgtccttattatataaatattttttgaattctgcaaggatttgagccgattctcttgcatatttcaggctgttgtggtaacctatttgtgttcggtttacataatgatagccattccgtcaaatgaaaggatactgcatatgaaaaattctgtttttaagaaaattggctgtgttttgtgctgtgctgcgctgctgctcagccttgcggcctgctcgaagcagaccggcgcctcggcagacccaacccccgcgccggaggcgacggcgagcccggaagcgacccccgcgccggaggacggcgcttcgcccacgcctgcgcccgaggggacggacgcggagcctacaccggccccggagggcggcacatcctcgaccacggagcatacgagcgtgctgcctgcgccggaaagcggcagcgacgatttccgtaaggcctttgaggaaaatccgatcgacgcgcagtatgccgaggacttggagcttgccgcgtcgatggcggccatcattgcggcgagcaacacggcgtcggagagctggcaggcgcagattgattccgtttacaagcagattctcgagcgcggcgacgaggaaaccgtcgagcaggccaaggaggcgcagtcacactgggttaacgagcagagtgacgcgctcaaggcaatccgcgatgcggtcagcgaggacgacgcgatggcggcggtcaccgtcgcggagaacatcatgctctactaccgcacccgtgcgatcgatctgtgcgccgtgctgtatgagatcgacggcaagctcgtgttcggctgagtgaattttgatgagcaaaaaggcgggcgccccgattcgggacgcccgccgtgcattttatgcaattacttgttgaacgggttctccgtcggatacggcagggacttcggctggttgtagccgatatcgccgacgccgaggtacttaaagacctcgaagagcgccttgccgaagtggccgaacgcgaccgcgccgtggtgcgggtaattcttctcgatcagcacgtggcggtagaagcggcccatctccggaatcgcgaaaacgccgattgcgccgaaggattttgtcgcgacgttcaaaacctcgccttccgctacgtatgcgcgaagctgcgtgtccgccgtgctctgcaggcggaagaacgtgatgtcgcccggcatgatgtcgccctcgagcgtgccctgcgtgacctcctcaggcaggttgcgcgccatgattttctggtacttcatcgagcagaacgcgagcttcttcgagcaggtgttgccgcagtggaagcccatgaaggtgtccttgtgcgtgtacggggtcttgtccttgatctccgcgttgaacatatccgccggaaccgtgttgttgatgtccagcagtgtgacggcgtcgaggctgacgcaggtgccgatgaactcggaaagcgcgccgtaaatatcgacctcgcaggaaaccggaatgcccatgccggtcaggcggctgttgacgtagcacggaacgaagccgaactgcgtctggaatgccggccagcacttgcccgcgattgcgacatactcgcggtagccgcgatgctcctcgacccagtcgagcagcgtgatctcatactgcgcgagcttcggcaggatctcgggcttcatgttgcccttaccgagctctttttccatgtcggcgacgaccttcgggatacgcgggtcgtccgcgtgcttgttgaatgcttcgaacaggtcgagctcggagttctcctcgatttcgacgccgaggtcgtaaagcggcttgatcggcgcgttgcaggcgaggaagttcagcgggcgcgggccgaagctgatgattttaaggctcttgaggccgacgatcgtgcgcgcgatcgggacaaactcgtggatcatatcggcgcattcctccgccgtgccgaccggatactccggaatgtatgccttcacgccgcgcagcttcaggttgtagcttgcattgagcatgccgcagtacgcgtcgcctctgccgtccatcagatcgtctgcggattcctccgccgccgcgacgaacatgaccgggccgtcaaagtgcttggcgagcagcgtctcggagatttccggaccgaagttgccgaggtaaacgacgagcgcattgcagccggcgttcttgacatcctcgagggcctgaaccatgtggatctcgctctcgacgatacagaccggacattcatagatttccgtggcaccgaatttttccgtgtaggccttcatcagcgcctttctgcggttgacggaaagggattccgggaagcagtcgcggctgaccgcgacaacgccgattttgacctgagggatgttgttcatgtcaaattcctccttgaaaatttatagcagattgttttttttaatcgctgcacaaattgtatgtacaactcgctcaaggctattgtagcgcatttgaaataaaaaatcaaccgtttgcgccaaatgttttgcgccgagcgcccgcagagcgcatacagggctgactgttcgggtaagctgcccttgccgcgaccagcgggttcgtttcctttgaccgacaaaacgcgtgccagcgcgcgcacccggcggcaatcgccgcccgcctagtgctcgtggccgtcggagatttcggggcggatgtactcgaaaatgcagagcgcgccggccgatttgcagaggcggtattcctctgcggtgcggatcgtccagctcgcctcctgcatcttcatcaggccgcaggcgatgcggtggctgatattgttccgcgcatgcaggtcgtacgcctcaaaatgcgggcgggagacgacattcgtccagagattgcgcgcaaaaaacgccttgaacccgctgttgaattccggctctttgccggtgaaatgcgccatgagctggccgcgcagcacgtgcgggtggtatgttttgaaccatgcgacgattttcgggtcaaacgattcgatgcagtattcacccttgtagtccttcaaaatttcccagaccagcgggcagagaatgtccacgggatcatagcttttgagctcaataatcagcggcaccttgccgccgacaaccgtcagcgcttcggaaaaaagcgggatgcgctcgttcgtcttgtgcaggcggtattccttgagctgcttgtagctcagatcgccgatcgaaatgtccgcaccgcagacgcgcttgaggctgcggtcgtggtgcacgacgacctttttgtcgcgggtcagctgcaaatcccactcgatgccgtagccggcgcgcacggccgcgcggaatgcggcaagcgagttttcgggaacggagagatccttctcgtgcaggccgcggtgcgcgtagtcgaagcgcaggagcttgtaaaaattcccgcgcgggcgcgcaggcgctatgcagaacagccacgcggccgtaaaaaacacgatcagcgcgagcagtatcgccaaaacgatccacagaatatccatatccaacttcctttctccttgtatgctcagcccttgcggtatttcgagggcgttatgccgaagctctcgcggaacacctcgatgaaatagctcacgctgttgaagccgcagtccatcgcgatgtccaaaacgcgcttgttcgtgtttgcgagctggtccgccgcgtgcgttaaccggacgccgttgatgaactgcaccggcgttttcagcgtgtactgcttgaagacacggcagaaatggccctcgctcatgccggcgatctccgcaagccggtcaatcgtcagcggcgcgcggtaattctcctgtatatgctgaatcgcttttttaatgctcgcggccgcggccccgtggcgctgcgctgcgctggcggcctccccgctttccgcaagcgcgccaaaggcggcgagcatgccggctttcgcggcgaattcaaagaacggcgggcggtcctgcaaaagcgtgtagacggtgtcgaaggcgggcgagatccggtcgtacagcggcgtgccctgccggatcaggctcggcaggcgaagctcgccgttcatgacgggcgaaacgtatttcacgcggagaatgtcgttcgtcgcgccgcagaggtagtccgggctgaatacgatcgcccggaaaaaaagatcccgggcgctgtccgcgggaacggcggcgtgcagctcgccgctgttgaaaaaggcgatgtcgccctcgtgcgcctcgaaaagcgaggtgccgcactgcatggtgactgtgccgtgcattacgcggaaaagctccatttcgctgtgccaatggcagtctaccgaagaaaagccgtcctccgggccgatgcagtactggacgatcggcagcagctcgtcgccgtgccggcgcgattccttcatgtttttaaattcgtttgtgttgatctcaaacaccacccttcgatttgctgtgtgtcaaaatcgttataaaattaggtaaatttacggtagactttgtttgctttagcggttatacttatcatagagcacttgcgggaaaagcgcaagtataaatctcggaattttgcaatttttttggaaaggcagtgagcttatgaaatttacaaaaggctactgggtaaaccgtcacggcgtcacaaatgccgacgcggtgcaggtcagagaagtcaaagtggagagcgaccgcgtgtatctgtacacggttccgtatgcgatggacatgcgcgctatgggcggcccggtgcttgaaatgttcgtttcctccccccagccggatatcatccgcgtggaggcaaaccacttcatgggcagcaaccagaagatgccggcgttcgagctgaacgacctgcactgcgcgctcgaggtagagaacaatgagaagcaggtttcgatcaagagcggcgacacgaagctcgtcatcacgaagaacccctgcgactttacatattactacaaggacaagaagctgacgagcgtcggcaaccgcttcggcaacgcgatgatcagcacaatcaaaaccgaaaacgaccgctatttgaccgaccagatggagctcggcctcgccggcgacaaaagcccggatatccgcgcgaacagctttatgcgcgttcagatggatctcgacatcggcgagaaggtctacggtctcggcgagcgcttcaccccgttcatcaagaacggccagagcgtcgagacgtggaatgaggacggcggcacctgctctgaaatttcctacaagagcatcccgttctatgtgacgaaccgcaactacggcgtgcttgtcaacgacccgggtccggtctcctatgagatctgctccgagcaggtcacgcgcgtgcagttctccgtgccgggcgagaagatcgacttcatggttgtcggcggcgcagatatgaagcacgttcttgaaaactacacgaacctttccggcaagcccgcgctgccgccggcatggacgttcggcctgtggcttacctcctcctttacgacgaagtacgacgaggagaccgtcatggagtttgtcaacggcatgcaggagcgcaagattccgctgcacgttttccacttcgactgctactggatgaaggagaacgagtggtgcaacttcgattgggatcaggcgatgttcccggacatcgaccaccagctcgaggtcatgaagaaggaaaagaacctcaagatctgcgtgtggatcaactcctacatcggccagaaatctccgctgttcaaggaagcaaaggagctcggttaccttctgaagaagccgaacggcgacgtctggcagggggacctgtggcaggccggcatgggtcttgtggacttcacgaacccggacgcctgcgcatggtatcagtcgaagctcagaaggctgctcgatcagggcgtcgattgcttcaagaccgatttcggcgagagaatcccggtcgacgtcgtctaccacgacggcagcgacccgctccgcatgcacaactactacacctacctctacaacaagtgcgttttcgacctgctcgaggaatataagggcaagaacgaggcctgcctcttcgcgcgcagcgcgacggtcggcggccagaagttcccggtgcactggggcggtgactgctcttcgaactacgcctccatgtctgaatccctgcgcggcggcctctcgctgtgcctctccggcttcggcttctggagccacgatatgagcggcttcgagggcacggcgccggcggacgtctacaagcgctgggcggcgttcggcctgctctccacgcattcgagactccacggctccaactcctaccgtgtgccgtggctgttcagcaaggaaggcgagcagaacggtgaggaatccgtcgcggtcgtcaagaagttctccgagctcaagtgcacgctgatgccgtacatgttctccgcggccgtcaacacgcacaagaccggcgtgccgacgatgcgcgccatggtgctcgaattcccgggcgacatcgcctgcgaggatctcgaccgccagtacatgctcggcgacagcctgctggtcgcgccggtgttcacgaaggacggcgacgtgacgtactacctgccggacggcaagtggacgcacctgctctcgaacgagacgaagatcggcggccgctggatgcgcgaaaactacgacttcttctccctgccgctgctggcccgcgagaattcgatcatcgcgatcggcgcgaacaaccaggagccggactatgacttcggcaaggatctgacgctgcatgtgtttgagctttcggacaaggcctctgcgaagatcacggacagcaagggcggcgatctgctctccgtctgcgcgaagaacgaaaacggcaaggtcacgatcagcttcgacggcaaggccgagaacctcaaggttctgctgcgcaatgtgaagtccgtttcgaacctcacgggcgcggcggccgaggcgcacgagctcggcacgctgctgaccgtcaacgcggcgctcggcgacgtcacctacacgctgtaaacggttcgaagaattactaaacaagtataaaagccggcgggcagcttccttttcagaggctgcccgccggcctgctttttcggcagagggggtttgatgacgtcccctatacagtttaatatatttcagcaaaaatttcttctaaagccttaaactctcaaataatcttaagaaaaataaaatggctgtgatacgggtagaatttgtgtcacagccatttttttgcacttaaattatcttaatgtactttttcgtattcgacagtatttccttcacttgaagtcagcttcattgttccaccgtgaatttcacaatcgtaattccatgagtaggatgtcaacgcggaatagttcactgtgatttttagacgattatcagacagcgaataatttccgtccgcaggaccatccatggaatagtccgttaaaataccatcttcaaagaattctatttcagacggaaaaaattcaccgtacaaagccatagaactcggtctagatgtagagttttcccatgtaccgataatgtctttttccggtgaaccgcacccaccgagacaaagacagttggagaacgttacgtaattctaaggagacaacctacacgcttattacaaagcatcatatatcaaattcaacaattcacagattgagaaaaaacagtcctataagtacagtgacaattaatgatttgtgcaggattttacaatgtgaaattcaggatatagcaatttatactgaatccgatgaagatatgaaattataaaaagaggacagccgcggctgtcctcttttcggtttgtgggctgttacgcctttttgctgttgaggtactcctgaattgaagcgaaaacctcgtcgacgttgaggccgtggacggcacatgcgtcctcgagggattcgtggatggaggacgggcagccgacgcagtgcatgccggactgcatcagaacgtatgcgataccgcggtcgtaatcgagcatttcgcccattgtggtctttttcgtgatttccatgatcattttcctttctataacgaaatggatttaccttcagtttggcgcctgcataaagaaatattccgcaggtgcattctatacttttccagtatacaatactatgcggcagaaagcaagacaaaaagggcggtttttccgcccttttcattattttttattgaaatcagtttccggttgcggttttgaattcggtccagatctttgtgtgtgcctcctcggcctcggcggaaacgttctcgatcatctcggtgctgccgctgaaatcctcgggcagcgtcaggaacgacttgtattcctcattgatgtattcctccgcggcgctgttcgtgcagtagtagccgatgtactcgaagcactgggcagccacttcggggtcgaggatgtactccatgaacttgtaggccgcgtcactgtgcggcgccttgctcggaatgaacatgcccatcacgccaaagccgatgccctcctccgggtaaacgacctttagctccgggttcgcgagcatggccattgtgacctgcgaggtgtacatgaccgccgcgccgatctcgccggaaagcaggtcgtcctgaatattgtcgtccttgatcaagcggatgttcggcgcgagctcaagcatcttcttgcccgcctcttcaatgacagcggtgtcctcggtgttgtagctctcgcccatcactttgagcgccatgccgttcatcacgcggaaattgctcgtgatgccgatattcgaggcgagcgacgggtcccacagatccgcatagccctgaatttcaatgtccacggcgctcgggtcatagacgatcgtctgcacaccggagccgtacggcgcggtatacttgttttcggggtcgaagaactggccctgatagaccgggttgatgttgccgaacgacggcagcttcgtcttgtcgagctctgtgacgaggccctcggcgatcgccgtctcgatgatgtagtcgtcggccacgacgatgtcgtaatcgccgccctcggccgcctcgagctttgcgagcatcgtttcatcggtgtcaaagttcacgtaattgaccttgatgccggtctccgcctcaaaggcgtcgagcacatcctgcgggaacatggcctcccatgtgtagagcacaagctcgtcggagccgccgtccgccgcagatgcgccgccttcggcgctgccgtccgcacaggctgcaaaggaggcgacgagcagcgcaagagccagaatggatgcgagtagctttttcatttcaattcccttccttgtattcggattgtagttttttcggctttttctcccggccgatcagcagggagaggccgcagagcaaaatggttatgccgaacatcagcgtacagagcgcgttgatcttcggcgttacgccggttttgagctgtgagtaaattttgatcggcagcgtgttggaatcgacgccggtcacgaatacgctgatgatcacgtcgtcgaagctcatggcaaaggcgagcagcatgcctgaggcgatggccggcgcgatgagcggcagcacgatgtcgaaaaaggcgcgcattttggaggcgccgaggtctagcgcggcctcctcaaggcttttgtccatgccgaccagccgcgccttgacaagcatgaaaacatacgggatgcagaaagccgtgtgcgcgatgatcagcgtcgtcatgccaaaaggcaggccgatcagcgaaaagaataccatgaataccatgcccagaatgatctccgggatcatgatcggcagcgtggcgatgtattccataacgccctttcccttgagttcgacctttgcggagccgaccgcgccgagcgtgccgatgacagccgccgcgagggaggacgagacgccgaggataatgctgtttaaaagcgcttcaaagagcgagcggtcgcggaacagctccgcataccatttgagcgagaagccgtcccacacggagctgatcttgctttcgttgaaggagtagatgatgacgagcacgatcggcacgtacatcagaagcaaaatcacaccgagataaatattcggaagatgtgttctgtttttcaatgcgtttcccatgcctttctgcgctgcttacacaatgccctcgagatctttcacgccggagatcttcctgtacagggcgatcatcacgcttgtgagaaccgtcagaatcacagcgagcgccgcggcaaaaggccagttgtgcgccttcatgagctggtcctgaatcaggctgccgacgagcacgaccttgttgccaccgaggatgtcggcgatgaagaacaggcccatagacgggatgaacgtcaggatgacgccggaaagcaggccgggcagcgtcagcttcagcgtgaccgtgaaaaacgccttgatgcgcgaggcgccgaggtcgcgcgccgcctcgatgaggctccagtcgagcttttcggcgctcgaatagaccgagaaaatcataaacggcagcagtgcgtagatcatgccgaccacaacggcggggtatgtgtagaggagctttaagggcgcgtcggtgatgccgaggctcatcagcagcttatcgaaaacgccgttcgcgcggaaaatgatgatccagccgtacaggcggatcagcgagctggtccaaaacgggatcatcagcagcatcatcgtgcgttttttccacttggcggtcagcttcgccatgaaatagccgaacggatagccgattaggatgatcagcagcgtgctgatgacggcgagcttaaaggattcggcaaaggtctgcaaatagacgggctcgaggatattttggtagtttttcagcgtgaattcgctcgtcacgccccaagtttcggcgcgctgcaaaaagctcagcacgaccatgtagacgagcgggccgacgatgaaaatcaaggtgaacaggtagagcggaagcagcatcagcgcttcctttttcagctttctgcgcggctttcctctcacggctccacctccacggcggcgccctccgcccacgaaatgccgacggtttcgcccggcgcaagcggggaatcgatgccgtggcggctcgcgacgagctcgccacatgattccgtatccacggtaatgcgcagcatgccgcccgaaaaggtcttttcgcgaatcacgccggtcaggcggccggattcgccgcggttgagctcgagcgcctcgctgcgcacggcgagacatttgccgccgagcgtcaggatattcgcggagccgacgaagcgcgcgacataggctgttttcgggcggtcgtagatctcgttcggcgtgccgagctgttcgaagaggccgtttcgcatcacggcgatgcggtcggacatattgagggcctcctcctgatcgtgcgtgatgtagatgaaagtgatgccgagctttttctgcaggcgtttgagctccgtctgcatcatgcgccgaagctgcaggtcgagcgcgccgagcggctcgtcgagcaggagcaccttcggggaatcgatcacgctgcgggcgatcgccacgcgctggcgctggccgccggaaagctcgcccggcatgcggccgccgaagccctcgagctgcacgagctcgagcatttcccgcacgcgcgatttgatttccgtcttcttcacgccgcggatcttcaggctgtagccgatgttcgcctcaaccgtcatatgcgggaaaagggcataattctggaaaaccgtgtgcacgccgcgcttgtctggctcggtgccggtcacatccgcgccctcgagcagcaccgtgccgctgtccggcgtttcaaggcccgatatgatgcgaagcgtcgtcgttttgccgcagccggaggagccgagcagcgtgataaattcgcccggcttcacagagagatcgatgctgtttaagaccggcacgccgccgaaggccttcttaataccttttagttccagaatttcgttcattttcacgtcccagctcccatacatttttatttttatgtgtgaattgtctaccaattcagtataatttctatgtttagttccgattatagggcatacgccgcattctgtcaatgttttttgtgcggcttacggattatttattttcggggcgcatagaaatgagcgcgaaaaaaccgccggaaaaaccggcggctctgcgcttcggttcagacgcggatgagcccgcggccgatatagctctgcaccgcgatgccgctcgtctcgggggccgtgcattcgaaaaatttgtacatgtgctcggcgcagccggccttttgcagcgcttcggccatcgcttttgtatccgcgaggcggaagctgctgagatcgaccacgacgtccgcgcgcatggctgcgattttttcggcgaaatacggcgttttctcgcggtccaaaacggaattttcttcctgctcccacgccgggtcctccgtgtaggggcggctttttccgtgtgtcgagggtgataacctgaatctctcgaaggactggcatcgcctcgccgtcgatttgaaggtgccgagcgcagagcgacgcatgcatctcgacgacgatacggacaatctcgtccggtatttggaggagggcatcgccgccggagagctttcgcccgatattccggtagaaccgatcgcgcgggacatcgtgttttccatgtacggcgcgtcggtttaccggtgcagcgcgtacacggcgttcggcctcgccgcgtggtcggagaactttatccgcaatgctttgatgctgcatatcgacccataccgcctcaaagggtgatcaccagccgtccacaccggcgcgctgcatggcgcccatcaccttctgctttaggtcgggaaattgcttttcaaggcctgcgatcaggtcggcggtatcctgccgggcagtcacgccgtcggccgggcagccgcttttgacgacgggcagcccgagcctgttcacagcgcggcggatgtctgcctctgcgcagaacgcgagcgggcggatcaggtacagatccttgcgcgaaaggtaacttttcggcgaaaagcagccgatcttgccgccgtacagcaggttcatcagaaaggtctgcaccgcgtcgtcgaagtggtggccgagcgcaatctttccgcagccggcgtccttcgccatatcgtgcaggatgccgcggcgcatccgggcgcagaggctgcacgggttttcctcgcggcggtcctcaaagatgaccttgccgaggtttgtgcggcggatgcggtactcgacgccccattccatgcacagcgcctccacggcgctgtagtctgtttccgcgccgctgaagcacgggtcggccgtcagcgccgtgatctcgtagcgcttcgggtagtagcggcgcatcatggcgagcgcgtacagcaggtagagcgaatcttttccgccggaaacgccgaccgcgatgcggtccccctcctcgatcatcgcgtatttatccgccgccgcgcggacatgtcccatcaaagcgtgcatagcctgccccctgttctgcgtttatcccgcaccgctgcgggcgtcttgtgttttcggaaaataaaaaaacgaccatcctattggatgaccgctttaagtgttggcatcaacctattgtcccgggccgtttccagccaagtatcgtcggcacaaacgagcttaacttctgtgttcggaatgggaacaggtggaccctcgctgtaatcaacaccaactatttgttgccgcctcatctgacggcttagttatgataccacaccgttcaaaaaaatgcaagcctttttttaagaaaatttcaaattctcttaaaattcgcagatgttgtagcagtgcctgcaaatacgcataaatattgtgccggaagccaaacgcttccggcacaatctgcgtgtttattcgaaatcagagcgccgcgagcgccttgtagctgtccttcaaagcggggtacagcttcgtgtacatgcggtagaaggcctcgtacttcggcacgttctccgcgatcgggtcctgcggcgcgttcaggcggatcacgcggcggcagccctcctgcaccgaggggtaaagccccgcgcctacgccggcgaggatcgcaacgccgagcgccgggccctccttcgagacgaccgtgcgcaccgcgcagttgtacgtatcggcaagcatctgccgccacagcttcgaggtaccgccgccgccgcaggcgagcatgccgtcgatggaaacgcccatgcccttcaggacttccacactgtcgcgctgggagaacgtgacaccctccatcacggcgcgcagcatgtcgtatttcgtgtgcattgcggaaaggccgatgaacgcgccgcggcagtccgggtcaaggtgcggcgtgcgctcgcccatcagatacggcaggtaaatcaggcggttgcagccgatcggcgcgcgcgcggcctgctggtccatcaggtagtacgggtctacgcccatgccggcggcgacctccttttcggcggcgcagaagttgtcgcggaaccacttgagcgagagacccgcgccctgcgtgacgcccatcacgtgccatgcgcccggcaccgcgcagcagaacgtgtgcacgcggccctttgggtcgatcgagatcttgtccgtgtgtgcaaaaacgacgcccgaggtgccgatcgtcgtgaacgctttgccgtcctcgacgacgccggtgcccacggccgcagctgcattgtcgcccgcgccgccgaccacgatcgtgccgggcataaggcccgtgcgcttcgcggcttcctcggagatcacgcccgtgacctcgggggattcatagaccttcggcagcagcgccttgtcgatctcgagcttttcgagcacctcgtcgctccagcagcggttcggcacgtcgagaagctgcatgcccgaggcgtccgaaacctcggtcgcgaaatcgccggtcagcatgtagcgcacgtaatccttcggcaggaggatgtgcgcgcacttctcgtagatttccggctggttgttgcgtacccagaggattttcgaggccgtgaagcccgtgagcgccgggtttgcggtgatctcgatcagccgctttgcgccgacgcgcgcggtgatctcctcgcactccttcgccgtgcgctggtcacaccagatgatcgagcggcgcagcacggcgccgtcccggtcgagcatgacgaggccgtgcatctggccggagatgccgaggcccttgatgtccgcgttgttcacgccgctttccgtgacgacggcgcggatcgtgtccgccgcggcgttccaccagtcgagggggtcctgctccgcccagccgtttttctcctgatataacgggtattcaatggttttcgaagcgataacgctgccctctgtgtcgaataaaacggttttagtgccgcttgtgccgagatctacgccgatcaaatattccacaaaaaatccatcctttcatgccgtgcggaaaagcacttgtccgcacaggtttctacatcttccattttgattcatttttatatttgtgtcaagtcttttttggcaatttaattgaaagtcattctatactgtgctaaaatggagtggaatccccacgggcggttcagtgtttatttcggagttgtaggaaaggatgagagagtatgtatgatgtagcggtgatcggcgccggtgttacgggctgcgcaatcgcgcgggagctctcgcgctacaaggcgaggctctgcgtgctggagcggggcgaggacgtctgcaccggcacgtcgaaggcgaacagcgcgatcgtgcacggcggcttcgacgcggcaaacggcacgctgaaagcagagatgaacgtgcgcggcagcgcgatgatgacgcaggtcgcagaggagctcgacgtgccgttcaagcgaaacggcgcgctggtgctctgcttcgacgagggcgagcgcccgggcttgcaggcgctttacgagcgcggcgtgcaaaacggcgtcgaggggcttcaaatcctcaccggggaagaagcgcgggcgatggagccgaatctgtcggacgcggtctgcgcggcgctttactgcccgtcctcgggcattatctgcccgtttgagctgacgctcggctttgccgaaaacgcggcggtgaacggcgcggaattccgctttgaaagcggcgtgacggcgatccgccgcgcgggggaccactattgcattgaaacggaaaagggcctggtcgaggcgcgcgccgtcgtcaacgcggcgggcgtctgcgcggacgcggtgcacgacatggcgctgccgcacgcgttttcgatcgccccgcgcgccggcgaatactgcctgtgcgacaagacggcggggggccttgtctccagaacgatcttccagatgccgtcgaaactcggcaagggcatcctcgtcacgccgaccgtgcacggcaacctgctgctcggcccgacggcctcggacctcgaggacagggagttcaccgcgacgacgcgcgccggactggacttcgttttggaaacggccgcgcgcagtgtgaagaatattccggcgcggcagatcatcacgtcgttttccggcctgcgcgcccacggcgaccgcggcgacttcattctggaagagagcgccgaaggctttttcgacgcggccggcatcgaatcgcccggcctcacgagcgcgccggcgatcggcgtctatatggcggagctggtcgcggggcggcttgcgctcgaaaagaagggggattttgacccgatccgccgcggcgtcgtccggctgaacgaattgacggcggcggagcgcgcggagaagatccgcgaaaacccgctgtacggcagcatcgtctgccgctgtgaaacggtttcggagggtgagatcgtcgacgcggtccgccgcccgctcggcgcgacgacgctcgacggtgtcaagcggcgcacgcgcgccggcatgggccggtgtcaggcgggcttctgctcgccgcgcgtcatggatattctggcgcgcgagctcggcgtgccggtgacggcggtccgcaagaacggcaaaggctcggaaatcgtctgcggcaaaacggagaaaggcggtgctgtgcagtgaaacgcgacattgttattatcggcggcggcccggcagggcttgccgcggcggaagccgccgtgcaggccggcgcgcgcgacgtgctgattctcgagcgcgatacgcggctcggcggcatcctgaaccagtgcatccacaacggctttggcctgcatacctttaaagaggagctgaccggccccgagtacgcggcgcggtttgaggcgcgcgtccgcgcgctttccattgaatacaagctcggtacgatggtgctctcggtttcgccggataagacggtcacggcggtcagccgggaggacggtcttgtcaaaatcgaggcaaaggcggtcatcctcgcgatgggctgccgcgagcgctcgcgcggcgcgctgaacatcccgggcttccgcccggcaggcgttttttcggcgggcaccgcgcagcggctcgtcaatatggagggctatatgccgggccgggaggtcgtcatcctcggctcgggcgatattggcctgattatggcgcggcgcatgacactcgagggcgcgaaggtgcgcgtcgtcgcggagctgcagccgtattccggaggcctcaagcgcaacatcgtccagtgcctcgacgactacggcatcccgctgaagctcagccacacggtcacggagatccacggcaaggaacgcgtcacgggcgtgacgatcagcgccgtcgatgaaaacctgaagccgatccccggcaccgaggagttctactcctgcgatacgctgctgctctcggtcggcctgatccccgaaaacgagctttcggcgggcgcgggcgtgcagctttcgcgcgtgacgaacggccctgttgtcaacgaaagcctcgagacgaacgtgcccggcattttcgcgtgcggcaacgtgctgcatgtgcacgaccttgtcgattacgtctccgaggaggcggcgtcggcgggcaaagcggcggccgcctatatcgcgcagggcggcctcggcggcggccgcgaaatccgcatcgagccgcgcggcggcgtgcgctacacggtgccctccgccgtgcggccggactgcatgccggagacgctcaccgtgcggttccgcgtcggcggcgtctacaaaaacagctatctgagcgtttatttcggcgaaaagcgcgttctgcaccggaaaaagcaggttatggcgcccggcgagatggagcaggtcgttctgaaaaaggccgacctcgaaaacgccggttttgagacgatcaccgtctgcacggaggaagactgatatggaaaccagaagttttatctgcatcaactgcccgctcggctgcccgctcacggtcacgctcgacaacgggaaaatcgtgtctgtcgcgggcaacacctgcaagcgcggggagacgtatgcggtcaaggaaatcaccgcgccggcgcgcacagttacctcgacggtgcgcgttttgggcggcgaacgcccggtcgtcgcggtgcgcacgaaaaccgacatcccgaaggacaaaatattcgtttgtatggcggcgatcaacgcggcggccgtgtacgcgccggtgcgcattggcgatgtcatcatcggaaatatctgcggtaccggcgtcgatgtgattgcgacggcggacaactggatgggaagcaaggagcatagggaacaggcatgatcgatacaattttattcgacctcgacggcacgctgctgccgatggacaatgatgttttcacgaagggctatttcaagggtcttgccgcggagctgatgccctgcggctatgcggcggagccgctcgtcggcgcggtctggcgcggcacggcggccatggtgaaaaacgacggctcgcgcctgaaccgcgaggcgttctggcagacgtttgaagctgtcatgccgggctggaaaaccgagcaccgcgccgtcaccgataccttttatagggggaatttcgatgcggcgaagcggtacaccggtgaaaacccgctcgcacgcccgctgatcgacgcgctgaaaagggacggcctgcatttaatcctcgcgacgaacccgctcttcccgaaggacggcgtggagacgcgcctgcgctgggtcggcctttcttcggcggatttcgagctcgtcaccacctacgagaacatgcactactgcaagccgaacccgaagtattttgcggagatcctcgaaatgacgggaaaatccgccgcgcagtgcctgatggtcggcaacaacatggatgaggacggcgcggcggcgacggccgcgggcatccggacgctgattgtcacggactgcctgatcaacgagagctgcacgccgctggccacatatccgaacacgccgttctccgcgctgtacaatgcaatccaggcgcagcgcgccgcggcgaacggctgagcgggcgcatccgtgcgggacgatggagcaatatgaaggagaaacgcagatggcgattatattcagaccgtatgatatttcccgggaccgcgactttctctatgccgcgcacagggagacgtcggaaatcacgttcggcgcgccgtttgacgacgaaaaaatctgccgggagctgtcgaaggattacgcggttcgcgacggattgtttctggatgggaaaatggtcggcatctgcgacctgagccgccggaattcgccggagctgggcacatacggatatgtcaatttcttctacgttgcgcccgcataccgcggtgcaggatttggcgggcacttggcttgccatgccgcagactggtgccgcggaaacgggctgtgccgcctgctgctccatacggggcggggcaacacagccgcgcagtgctgctatgtgaaaaacggatttgtgcggtttccagcgtttgacaaggtgccggaatggggctatgcgctggaaatcggaggagaagagagatgaacaaggaaaattatcaggcggtcaattccgccgtcatcgaccggtgggtcgcagaaggctgggaatgggggaagcctatcgaccatgagacgtacctgcgcgcgaaggcgggcgaatggggcgtttttctcacgccgaccaaaaccgtgccgcacgaatggttcggcgacctcgccggaaagcgcgtgctcggccttgcaagcggcggcgggcagcagatcccggtattcaccgcgctcggcgcccgctgcacagtgctcgactactcggcggcgcagctcgaaagcgagcgcatggtggccgcgcgcgagggctatgcggtcgagtgcgtgcaggccgacatgacgaagccgctgcccttttcggacgcgtcgttcgacctgatcttccacccggtctcgaactgctacgtcgagcagctcgacccgatctggcgcgaatgcgcgcgcgttctgaagcccggcggcgttctgctcgccggctttgacaacgggatcaactatttgtttgaggaaaacggcacacagatcgtgcagaagctgccgttcaacccgctgaaggatgaggcgctgtaccggaaatcgatcgaaaacgacgacggcattcagttttcgcacacgatcgaggaggagatcggcggccagcttcgcgcgggctttatgctgaccgatatttacgaggatacgaacggctacggctcgctcgaggacttcggcgtgccgacgttctacgcgacgcgctgcatcctaaaataaaagcgcatccgccggaaagcgggcgcgcggcaaataaagcgaaagacacggtgcacagccggaaaacggcgcgggcactgtgttttttgcatttttatgaaaaatattttttgaaaatcgaagtatagaaaacaagagatataaagagaaaacaaaagaaaacgggagatttgattttacagattaaaaaacgcgaaaaaatgtgttgacaagccgttttccctgtggtaatatcatggagcgcccagccggaaacggcgggttttatcggatggtttcgtatccttgcgaatcgtaagatacagagcatattctaaacactttcttggaggtaaacgctatgtccacttatatggccaaggccggtcaggttgaccgcaaatggtatgtgattgatgcggcgggcaagccgctcggccgcgttgcagcgcaggccgcggttcttctccgcggcaagcacaagcccacctttaccccgcatgtcgactgcggtgatcatgtcatcatcattaactgcgcggatgccgttctcaccggcggcaaggcggaaaagaagtattattatcgccacacgggctacatcggccacctcaaggctgtccgttacgacaccctgatgcgcacgaagccggaaaaggcgatggagcttgccgttcacggcatgatcccctcgaacacgatcggcagagcggcagaggcgagacttcgcgtctatgcgggcagcgagcacaagcacgctgcgcagcagccggctgtctgggaactttaataggaggtaaacgaacatgtacgataaggcaccttatttctacggcaccggcagaagaaagagctccgttgcgcgcgtaagaatttatcagggcacgggcaaggtcacgatcaacgaccgcgatatcgacgattacttcggccttgatacgctcaagacgatcgtccgtcagccgctcgtcctcaccgagaccgacgagaagttcgacattgtctgccgtgttgcaggcggcggcgtcaccggtcaggccggcgcgatccgccacggcatcgcgagagcgctgctccagtacgattccgaaaacctccgcgcgaagctgaagaaggctggcttcctcacccgcgacccgagaatgaaggaaagaaagaagtacggtctcaaggcagctcgtcgcgcgcctcagttctctaagagataacaggcccgacaaaccaattcaaaaatgttcaaaaagcccggaaccatgcggttttccgggctttttctattctcgaaacgctgattttgtttctctaattttgttcggatttgaacggttttgacctcatttttcttgattaaaaatggggcaacaggcatttttgaccccgttatgattaaaaaatggggcaactgggagccgaaatcgggccgtttttgagagggattttctcccctgtgacagccagcttttacggtctgttattcctggattttcttttggaaggtttggccgggtttgtcaaggtttgactaaaccgaatacagtttattctgtcttttacataagattttttctatgattcaagttgcaaagtattcgcacatttgtaaaaatgctcccctttctatacaatggaggcacaaaggaggcgtgtcaaatgaaaaagcggaaacttaaaatatatcttacccccacagagaaccgcattgtgatccagagccttaacaacctgcgcaacgccatgctgaaagaaaaccgggacaccggctgtatcgacgaacttttgctcaaggtaatgtgcgccccggtgaagaaagtataaaaactacatatccccgtccgaaaagggccgttttatctgctgttagataagacggccttttttcatgcccgtctttcagatttcccgcgtacatagccgtccgtcttgccaacgggcggctaaatctatggaaaaggaggacatgaaaatgccggaacaaagaagccgcccgaagaatggccgtgtgatcgcattagccaatcagaaaggcggcacaggcaaaacgaccacgacggtcaacctgggcattggacttgcacgtctggggaaaaaggtgctgctcatcgacgcagacccacagggcgacctcaccacctgcctgggctggcaagatcaggacagcttgcagaccacccttgccaccgtcatgggaaaaatcatccgtgatgagccattcaccacggatgagggcattttgcaccacagcgagggcgtagaccttatgcctgccaacatcgaattgtcggagctggaagtcagtctggtaaacgccatgagccgggaggtcactttgcgcacctatgtcaatgaggcaaagaaaaactacgatgtggtgttgatcgactgtatgccgtccctgggtatgattaccattaacgctctggcagcagcggacagcgtgattatccccgtccaggcccactatctccccgcaaagggcatgacccagcttatcaaaaccataggcaaggtgaagcgtcagatcaacccggccttaaaggtggacggagtgctgctcaccctggtggacggacgcaccaatctggcccgccagacggcggataccctgcggcagagctacgggagcgttctgaaaatctatcgttccgaaatccccgtggcaatcaaagccgcagaaatcagcgccgcaggcaagagtatttacgcctatgacaaaggcagcaaggtggcccaggcttacgcagagttttcaaaggaggtgctggcagatggcgaaaaacaacgcgctaaacttcaatcttccctcagccgatgacctgttcagcaccgaagaaagccgggcggaggcgcgcctggaaaaagtcatcaacctcaatccctcggaaatcagcgattttcctaatcatccatttaaggtgcggatggacgctgccatgcaggaaatgacggagagcgtgaagcagtacggcgttttggtgccagctttagtgcggcccaaaccggacggcggttatgagatggtggccggacaccgcaggaaaaaggcggcggagctggcaaacctcacagaaatcccctgtatcgtgcggcagctcaccgacgatgaagccacgatcattatggtggattccaacctgcaaagggaacaaatcctgccctcagaaaaggcgttcgcctacaaaatgaagctggacgcgatgaaaaggcagggacagaggacggatttaactttatcgccagtggcgacaaagttagatacagcggcgcaactcggacgacaaagtggtgaaagtagagatcaagtgtttcgttttatccgcctcaccaatctcatcccggaaattctggaattggtggacaattcggtgttgaaagacccggaaacgctgcaaatcgccctgcggcctgcggtggagctgtcctacctgcgaaaagaggaacaggccgacttgtttgcaatcatggacgaactggactgtaccccgtcccacgcccaggccatcaaaatgcgtcagatgtccgaagccaagacaggcggggaacgattagccaaggacgcgcttgtttccattatgaaggaggaaaagcccaatcagaaagaacaattcaaaatcccaaaggagcggatcaacaaatattttgcgccggggacgcccgcgcagaagattgaggataccatcatcaaggcgctggagctgtatcgaaaacgccaacgcagtttagagcgataaccttactcacaagggagaagtgcgcccatttgcaggaaaacgcctggctttgcaggtttcccctctccacacctcaccccttccagacaacctaaacagcctaaaaaagaagatatatccagagccttagatgatagaaagccctggcaggcttcttttcaacagacgtgtggggttgtgtggaagggcggataagaggcagcgattcgggcgcgcctctcttttttagaacgtaaacgaatccagccgtaagcagcacatccaaagcgatgtgctttttttgcggccatttcaaggaggtaacaagatgaaaacactgaaaaagcctctctccctgctcatggcgctgttcatgtgcctgggtatgtttgcggggacaggtgttacggcgtttgccgcaggagaaaccatgacgacgtatatggtggatattccccgtgcaaacgaccccaataaagcaggctggggccatccggccctcaactttctgggcggatggtcaaccagcgcaggcacccacttttccgtccacacccaggacgcatacaacgggcgcgctatctactgtatcgagcctggaatcggcgtccat

SEQ ID NO: 280 - DNA, 184099 bp, UBA1417 FBI02365
  source 1..184099: mol_type = genomic DNA
tttctagataccggatcaaaattaaataattagcttttctctcattttgagagaaaaagcagttccacaattcacagtcattgcgactttatgtcaccagatactcgtcagggaaaagatttaatgggtacctttattgccgatcttgtactgcaaatcctatcatttgtagcacagaatgagcacgagtacattcgcaagcgtcaatccgagggaattgttgcagcaaaagccaaaggcgtcaaattcggcagaccgccttttccgctgccggataactttcatgcagtgcataaagcatggcgaatgaaaaatctgacattaaaacaagccgctgcagcctgtaatatgcccgtcggaacattttacagcaaagtccttaaacttgaaaacactacttaaaaattctattctcaaattttgaaaaggtgtactttttcaaatttttcaaaatgtaaaacaatttctcaaaatcagttgagatttgtagcttttagctgtataatgtgaacaaagtaagatgaatatttaattttgaaaaagtacaccattacaaacctgaataggaggaatatctccatggcacaaaccgttgaagtcattaaatatgaaggcgacaacagtacatttatctggaaacatccctgcgaggattttaacagtcttacgcagctaatcgtgcatgaatcgcaggaagcaatcttcttcatgaacggtcaggcgctcgatcttttcggtgccaggcgttatacgcttgaaacacagaatatcccaaaaatcgggaaattcctgcatcgcgagaccggagatacaacgccgttccactgcgaagtataaccgcttgcaggagcaggcgcttgaccacatcaacatgtacacacctgcccaaatgaaagaaatcgcaaaagatgcccacgcgccggaatataaaacgattagcttgtaccttgcgcgaattgagcatttctgcgttgggggcaaccaaaaaatctacgaccccaaaacggtttacgaactggcacacggttatttcgacggaggcttgaaaaggcgtgttgatcccatcatctcgcagaaaaaccaatcgggagaagatttctacgctaacattcacaaggttttcgtatggatggaaaatgaaacgcaaaagcgtgaaatcaagcgcagctaaagttatgtaaacaagaaaagcaagagtgattttgagggtatcccttagccgagggatgccctcattactttaataaagcctttttcatttttattgtgatgataacccgataagcttctaattgtaaacaatttataaacaaacgactttcccccgtttataaatcgccaaaaaatgtcgtgtatagaactgaacaagccccgcatacagggcatagacgaccgccccatcacagcggagggatgtatccccatatcctatgaggataatctgcgcgggaaaatcgtggtgataaagccggaggtgttgcgccgggaataccgaagggccacccgtcagctcaagctctgtctgggcggctttggaacttatccacacagccgagggtctgcctgttattgcattgacctctataccggaaaagagggccggtatgagcgcatggatgtgatgggaacgatggaaccggaaaaccttcccggctgggccaggcatgggcttactgccatccggcaagagcaaaccaaaaagaaaaccgataaggagcgtgagcgatgatggattacagagaaaatgcgggatatgtcataacggattcctgccatgtgggcgacagcgagtttgtgctgggggttcatttgacagcgccccagcagtttgtcacctggaaatgcaaagaccggacggattactactggggccactatttcagcagcctgtttgaagcgcagaaagattttgtttcgcgggcgcaggaggaggttcaatatctggagcagcgcggcattgaccccaacaagatggagctggaacccgccgattccccctggggagaaatccagacctgccacaccctttgccccggcgcttattccgtcagcaccgcaggccatggcggggttatggtcagccgggagcttgcagacaaggcgctttgcaaggaagccagagcctgcggctttatggagcgcggctacctttgctttgaggaggactgcgccgcgccggtggcattgcgggagctgatggacagagggctgtatcaagcgcctgtcaacgagtattttgcccctggggaatacgaggctgtgattaacgacagcctgcaaaccttccacccggaatactggcaggcgcgggaagcattgagggtagaaaaggcgcgggctccccactcaaaaactacaaaacacaaggagcgtgagcgatgatggaatttccaattaccagcatgaccccggaggaacggctgtacgcatacagccagagcagcaagatcgagaggcagacgggctgtatcggctatctgcgcggggattttggcgctggaaaagagttttatacttcctggttcgaccatcaaaaggaatataagggcgaggagttcaaggcagagtttgatgaggtggtcaacaccctgcgggaaaaggatgggctgctttgcagccgggacagcatgagcaggttttgttatcaacatccagaggccgaatttgaggggaactactgcaccgaatatgggtttcgtgtgcaaacgccccagcacacctatatgctgcggtgcaatcccaactatggagattacgacttctacctctacgcctacgttgcccggtttctggaacatcacatggaaaaagccaaacagggcattcggtttatcacgcccggctacaaggaactgttccgtattcccgatggcgaccacatccgcattttcactggcggcggagaaacccgcgaccgtacctgccggtttatcgacgaaacccattttgaaaccagcggagggtattccagcgccctttatcatatctgcgaatttgcagagcgtttggaacagtctcacgggagcgtgattcccctgcgctcctctttgccagaacactgctatatttatcttcccacaacgagggaaatcggcattgtaaaaaaaggtgaaagtggctattatcgcagcgaccttacccctgtttatggggaggatggcaaacagtttgtggaagaattgaaccagaaaggcggcataacaaaagcgcaggaggccgccatgcttgccggctccatgttcggctggcagaccccagccgccgatcccaaaaactatgacgaacagggacagccaatcaaacgaaaaaccaaagaccggggtgaggcccgatgaaggaagcaaagcacatcatctggagcaactacggcctggactatgaggactggcgggaagatttagaggcggaatatccaagtctgtccgaaaatgaacggatgttcctgatgtatgagatcaacagcgagtatctgaatgatgaacggatgaacctcaatgtgaaactctcccagcccattttgatggttggagatttagaactgtgggatgggcagcgcacagggtataaagaaatcaaaagcggcaacatccgcgactgcctttatggggataccgattattccacctggtatgtagaccggctgggcgacctgcgctgtgaggccatccaccacgacggcacaaaccattatctctaccgggtatataaggatggggtgtcggaatcacagattgaccttctaaaagaaaaactatgccggggaaccgcgacccgcgctgatataacgagagtaacccgcaggctgggcgacgacatcgccaaagtctacgggttttctattcccagacagcggcaggccgcagccatggaaagatgaggtgatgaaaatggcgtctttaccgcccgtacaactggatacgcataaggactggtttaatttgctgatgacggttctccatcagcaggccgaacagaacccctatgaagaataccgggagatggcccaaaagctgatcggccagtttatgcgctatgggaggccctttactgacagcggccttgcaccctgcgtggagcttcggatgtacccaagggaggccgggaacactatctggcttctgctgctctccctgtgcaatcattacgacccggataaggattacagcgcagaactgaaagctgcgaaaaaagaataagtaaaggaggtgcgccggatggcgatacgatataaagcattgacggagctgtaccaggaagcccagcgcagcgtgacagctccaggggcatggcagaggtttcttgtctcagcctgccgcaactaccgcctgccttttgacgagcagcttctggttcacgcccagcgcccggacgccaccgccgtcctggagatcgagcgatggaataaacggtttgggcgctgggtgaaccggggtgcgaatggcattgctgtgtttgacagcaggcatacagacaggccccggctgaaatactactttgacatttccgacacccatgagggcaacttcccccagcccgtccctctttgggctgtgaggccggaatatgaaccggaaatcatcgaaacgctggagaacagctttggcgagctggagcataaggaggatttaggcacggccctgctctctgcggcaaaaaacgcggtggaggacaacattcaggactacctctccgagctgaaaaccattacggaaggcagttttctggaagaactggacgatctgaacctggaggttctataccgcaaggccctggaaaacagcattggatacaccattgagctgaatgataccgccaatgatgtgacagagcagatcatcaagggggatattgccatcatcaaacacacggacgatggcgaaacaggaattgaaaccccggaggaaggcgcagagttccaaatctatctgaaagctgcgggcagctatgacgcggcaaaggactccgagcgcgatgttcttgtttgtgatgagaatggctttgcgcagtcgaaaaagctgccctatggaacgtatatcgtccatcagaccaaaggctgggagggccgggagctgatggatgattttgaggtgtatatctcccaggacgggcagacctaccgctatctcatcaacaatgcagcctttgaaagctatataaaagtagtcaaggtggacgcggaaaccggcgtcaccatcccctatgcgggcgcaggcttccagatttaccgcccggatggcagcaaggtggaaatgaccttcacctatccgacgcccaccacgattgataccttttacaccaatgccgagggctatcttgtcaccccggaaaagctggagtatggctccggctattcgctggtggaggtgcaggccccctatggctatgtgctggacagcacccctgtgtattttgatgtgaccgaggacaattctaccgaggagggcggcgtgacagtcatcgaagtcaccaagtccaacatggcccagaaaggcgttatcaaggtcagcaaaaccggcgaagtattctcatccgtgcaggaaaacgagggcgtttatcagccggtgtacgaagtgaccggcctgccgggcgcggtgtttgagatcacagctttggaggacgtctacacgccggacggcaccctgcgctattctgcgggcgaagtggtggacaccatcaccaccggggaggacgggacggcccagagccagcctctctacctgggcaaattccaggtgaaagaaatcgagttcccccacggcatggcggacaccggcgagaatatcaccgaggtggagcttgtgtatgcaggccaggaagtcgaaatcaccgaaacttctgccagcttctacaaccagcgccagaaagcccttgtgacgcttgacaaggtactggagcaggatgaaacctttggtattggcatgaatggcgaaatcaccgctgttacctttggcctctatgcccaggaggacatcaccgcagcggacggctccatcatcccggcagacgggcttctggaaatcgtttctgtggatgagaacggccaggccatgtgcaagaccgacctgccttttggcagcttctatctgaaggagctgtccaccgacagccattacctgctgaatggtgaaaccttcccgttcagctttgaatacggcgggccttccctggccgtggtggagattgccgccaacaatggcgaggctgtttccaatgagctgatccgcggtgaaatccggggcctcaaaaccgatgagaatggcacgggcctttccagggctgtgatcggcctctttcagagcgatgaaaccgagtttaccgcagaaaacgcccttgccaccgccacctctgcggaggacggcagcttctctttcgcggatgtgccttttggggattgggtattaaaagagctggaaagcccggcaggcttcattctctctgatgaggtcatccccgtcactgtggaggaagatgggcaggtagtggaaatctcccttgccaacgagcgcatttacggcaacctgcggctcacgaaagtggataaggactacccggacaacaagctcaccggggccgagttcgaggtgtaccgcgataccaatggaaacaaggagctggacgagggcgacgagctgctgggcaagctggaggaaaccagcaccggcatttatgagatggcccatatcctctacggcggcgtgttcgtaaaggaaaccaaagcgccggagggcttcctgctggatgaaaacgcctactatgtggagatcgccgaacacggcaaaatctacgaggtagagaacgaggccggaaaaggctttgtcaacgcggcccagaccggctccctgcggattgaaaagacatccagcgacggcaaggtggagggcttctccttccgcgtgacgggcgcgaacggttacgaccagaccttcaaaaccgataaaaacggtgaaatccacatcgagggcctgcgcgtaggcgattacaccgtgtccgaggtgtcggacggggccagcgccagctatgtgctgcctgcggataagacggtgacaatcctggcggataagaccactgtggcgcaaatgcacaatgaactgcgcgacacaccgaaaaccggcgatgacagcaagccgtggctttggatggccctcatgggcgtgtccgctgcgggcgctgccacgctgggtattctgggatatgtgaacaagagaaaaaagggtaacaaatccgctgaataaggcggtttgaatttgtgtcaggaggaaatcatcatggaattaaaagcaatcattgccatcgggcttgttcttttcatcatcggcgggctgatcttccttaaaatcagaagccggaagaaatagcagaagccacaggggcggccatacggggccgcccctcttacatacccaaaaaagaactggaaaggagcttgatggcagatgaaagaaccatttgaacagcggctgttccgcattttcgcccaggcgggctattccccggtgcagcttctcaccgtcaccccggaggagatggtggagatccccggcattaccgtccccaacatccgggcggtgctgtgcgtccagaacaaggtgctggccgaccgcaacaaaatccgcagcggcaggctggtggaggagcttctgaaagaggcgggagggatggaggtgcgcccatgagcgagctgcatatattggacgtcctggcggcccggcgcggctgctacatttccgacctcaatcttgcaccgttcctgcgccggatggcgctgtccgacctacgccggatggaggaaaatgcctatccgttctctcaatggcaggaggcggtgcgctacctcacaggggatgaacgggatttcgccagtgtaaaggaaatcaaggcgtttattttgagcgaaacggaggcaaagagatgaacgatgatttacaggaaaaacgcatggccggtgattatgagatcatccaagggctgcatataggcgaccgggagattgttctgggggaaaatccacgggatgaaaccggcatgaagtatatgtgcgccttttgccgtcaaaatgctttgtttgcagaatacagcgaagtgatggcaagtgatgatttcccagagattgcagagctgttcggccaacgggttgccgagcaagcgcagaaaacccgcatagtgaagggtattttttccgcggtgcggtgcgttttgattttgcgtcccccgaaacggctgcaccgtttcccttttgaaccttgaaaactgaatatccacttgtcaaatacgttctctttgcggcgagcgtgcaaagcggtgcgccatgacctgcttttcagcgagcgaaattcatcgacttagaataccgggcagctcccggttccgctatgacccgcaaagagcataatgatactcccgttcagtcacagtccgagcacctaagagaccgccactccgatggtgccgcaggcaatgagaatggctctgacagaccgtcagttggggtaaaactcccgtggcgtcggctcgctcccgaccgtttggcaggttacataccgaaatgaccatctttcgtgtattcgcagaacaggaggaaacaccactatgagcgacaaagaacgaaacttcacatgtgatcttcactgcaaaggagccgcaacgccgatgtgtgcgcaagtcgaagtacacgtaccaatccaccttaaaatgacactgacgataaaagaagcggcggaatacagcagcatcggaataaacaaaatagacgccatgctgaagcagccgaattgcccgttcgtgctttttgtcgggacgcggaagctcgtgaagcggcgtgaatttgaagaatatatccgccataaactggtcatatagagcttttagccgcaaaagccccgaaaaattcccgttgagattgaaaaagcagagtccttatgctataatatgtaactgcgttggactctttttaagaataagaaaggagtccgattatgggcaaaaatctcaaaggtaaagagtgcggcaaaggcatttaccaaagaaaggacggtttgtactccgcaagatactacgcgaaaaacggcaaacgcaaagagaaatactttgaaacactgccggaagcgaaaaactggcttgctgacgcaagatatgaagaacggcacaatctgattgtcacgtcccccgatatgacggtggataagtggtttgcatactgggttgaaaacatcatctgcgatcttgctccgaacacgatacggaattatcaggaacgctacaaatggaacattcagccggtgatcggctccatgtgcatagccgatgtaaaacccatgcactgcaaagccgttctgaatcgaatggaagctacctatgccggttctaccattcggcaggcttatatcacaatgggaaccgtgttaaagtcggcagttatgaatgacattatcgtcaaacaccctatgcacggcgttcgttatacgaaacccgttcgggcagcagatgatattaaatttttgactgtcgaagaacaggaaaaatttcttgaagcggcggcacattcgcagaactatcggcaatatgcgctacttttggaaacgggactgcgaacggcagaactgatcggtttaacatgggattcgattgattggaaaaagcacacgctgaccgtcagtaagagtttagagtatcggcacagccaaaaatgctggcgagccggaccgcctaaaacgccgaagagctaccgcaccattccgcttacagacaaagcatattccattttgaaaagctgttatgaagaaaaagacagccggaatgaagctgaaacgctgtcgcagatcttagaatggttcattattcccgaccatcatccggcaatcgttgacaaagaactatttgaaaaggtgcaggctgtgcagcgccgattctccttgccgaccaagaaaaccagggagtacccactaaaaggcaaggtctattgtggctgctgcgatcatgcactttcccgcatcgcccaaaagagaccgttttatatgtgccgccattctaccgctgatgtgaacagccgctgccgcgatgtccgggcagatgttgctgggctggaagaagccgtcctcctcactttgaaaaagcagctggaaatcctgctgcccgtacataaagacggcaccattcacctggaggctaccgctgccaaatgctctgagtatgagaagcaactggaagctctgaaggaccagaagcaagctctctttgaacggtatctcttggggcagatcgagctggacacatataaatcggagaaagcagtttatgacgcagaaatactgaaagtcaaaaatgcctatgctgctgtcaccgcccaggcaaagctgaagcgagaagaacaggcccgccaaagcagccgacaagaaatcgttcactcgattgcagaagcggatgtgctgacctctgagctgaccgatctgctgattgaaaaggtgtatgtattccccgacaaccgcattgagattatctacaaagtccatgacctctttgaataattgaaggtacaaaaacggaaaacccaggctatcaaattcatcttggtagcttgggttttctgcttttcagaattatattttttttgtcgtgtgcttgacatacgggtgtcgaatgtcgtgtattctaattcgttttacacctgaaacttttgagcctctatccatttctcggtgcagatagcttttggtaacaggaaacattctgtcctccagccccacatcataaagtattttcaaatagtcctgcatttcatcgcagaggaatttgggcatctgaatggtgcggttgctcttttctgttttcggcgtggtggtaatatccctgccattcaggtgttgaaacgatttgttgatcatcaccgtccgcttttcaaaatcaaaatccgcaggcgtaagagccaacaactctccctcacggataccgcaccaatagagcatttcaaacgcatagaaagacatcggtttatccatcatcacatctgcaaatttcatatattcttctttcgtccaaaagagcatttcacggtttttctttttgcccatactgcctgacttcttgcagggattttcttttaggttgtaatacctgacagcatgattgaatatcgctgatagctgattgtgaatggttttcagatatacaggcgaatactgctttccgttctcgtctttatgattgataagttcgttttgccatgtgataattgctgtgcggtgatgttgcacatcttcagcttcccgaaatagggaatgagttttgtctgaataatatgctccttcgttgcccaagtgttttccttaatgcggctctgcatatctgcggtgtaatgctccacaaagctcttgaaactcatatccaagtcaccgcccaacttgttaagctgctcacgctcccaagcctgtgcttcacgcttggttttaaatccacgcttctgcgtttgttttcgctctccgttccaatcggtgtaacggtaaagcactcgccaagtgtttgttttttcttctttatatactgccattgtttaatccctctctttcttagttgcaccgtagcaggtgcgttccataaaatatcgcttattcactcgccccgaaattgtcataaaccctttttcttttaactcggcatttaatttctgaacgattttgtaagcgtatgattttgagatacccaattcctgagccacctcatcaactctcataaagctcgtactttccatttcatcacccccctttatttgtttttgataattcgtttatttagtgtcggagaactttctgaccgcattccgatttgcccgagcggatatgccattaccgtgacatatgacggttattctgttgtcaagcaataacttaacgctatttgcttaactattatactaaacaaattccgtaaagtcaagtggtttttaagaaatattaaacttttttgctattgctatcttgacaatacttaaatatatatgttatactgattgcacaatacataaacaaggagcgtaattgctatggcaatcggtgaaagaattcgtttcttccgcaatctgcggggaatgacacaaaagtatttaggaacggtagtcggctttcccgaaaagacagcggatattcgtatggcacagtatgaatccggctcaagaacgccgaaagctgatttaacagaaagtcttgccagcgtgcttggagtttctccgctggctctgtctgtccccgacattgacagctatcttggtttaatgcacacgctgtttacattagaggatcgctacggtctgacaattgaaaaaggggagaacggcgtttctatgcgtgttgaccctcgcaagggaaaagacgctgccgagctttccgaaatgctaaatgcgtgggcagaacaggctgaaaaatatcgcaatggcgacatcagccgtgaggactatgacaagtggcgttataactatccgaaatatgatgaaaattccggttatgtgaaagtgccgtcgcaagcactcagcgatacacttcttgaaacatataaagataagctgaaataaatgatagggggaaatgataatgtcagaaaaggaaagcaaagtccgactgggtgaaggtatttctgatggcgtaaaaagtaaagttaatcaagaagcattaggcatttgcaatcttcttcttgagcgtttattcaagtatctagagggaaaagtccaagacattgactttgaaaaactttttagcaaaaaggataaagagaaaattgtttctctttggtcttccacacttgaagaaaaaggtcttcttcccaaagggtatgcgggattgcctgataatcttttgattgacaatatgcatcaggatggatatatggagggtttatatgctggatacgctctatctatgatatctctggttgataacaacgcaccaaaagagttgattttctctgtaagagatgaagttcgcccaaatttgtttggacatcattttaatgacagagatgaattctataacctttataaaagtgaaaagtatagctgggttgaaaattctaacaaagaagactaatataatcggtgaattaaaattttacagcatacaaaaagagctaactgacttatcaaaaaatcagttagctctttacttttacaataattcaaataatgttgccattttgttgccacagagggctttcaaacggcgaaaagcctttattcacgggctttttcacgggtgtgaaatcattcccactcaatcgttccgcagggcttcggggtgaggtcgtagagcacgcggttgacgccggggacttctgctgtgatccgcgctgtgatatgctcgaggagctcgaacggcacattttcgaccgtcgcggtcatcgcgtcgaccgtattgaccgcgcggaggattaccgggtaggcaaacgtgcgggcgccgtccttgacgccgacggagcggaagtccggcacggcggtgaaatactgccaaaccttgccctccagcccgttctttgcaaactcctcgcgcaggatcgcgtcggattcacggacaatctcgaggcggtcgcgggtgatcgcgccgaggcagcgcacgccgaggcccgggcccgggaacggctggcggtagaccatgccgtccggcaggccgagcgccttgccgacgacgcggacctcatccttatagaggaacttcagcggctcgaccagctcgaatttgagatcctccggcagaccgcccacgttgtggtgcgccttgacgccgtcgctctcgatgatgtcggggtaaatcgtgccctgcgccagaaactcgatgccctcctgcttgcgggcctcctcctcgaacacgcggatgaactccgcgccgatgatcttgcgcttcttttccggctcggcgacaccggccagcttatcgaggaagcggtcgaccgcatcgacatacacgaggtttgcatccatctggttgcggaaaacctcgaccacctgctctggctcacccttgcgcagcaggccgtggttgacgtgtacgcagacgagctgcttgccgatcgccttgatcaaaagcgccgcgacgaccgaggaatccacaccgccggaaagcgcgagcagtaccttcttatccccgacctgcgcgcggatctccgccacctgctccgcaacaaaagcatccgccagcgcagccgtcgtgatgcgctccatcgtttcgggccgtttattgttttccataaagtacctccgggttacagttttcttgcctttatcttatcaaatccgaggcgattcgtcaatgcaagtgccgcctttttctttgtgcagactgcataaagcgcagtcctgcaaccgcagcactccgccggccggcctttccccgcgcccttttacccgtgcgcctccacatgtaccagacagacatacccgccgattgaaccggtcactttaaactttcccggcaaaaaaggcaacggaagcctccagcacggcgctcggacacgctgcggcattaccgcaaactgcgtgaagcccagctctaggcgtgcttcccgcttacaaattgctcaaactcactcaaactctatggtcgccgggggctttcccgtgcagtcgtagagcacgcggttcacgtgcttgacctcgttgacgatgcggcttgtgaccgtctggatcaagctccacgggatctccgccgcttccgccgtcatgaagtctgtcgtcgttacggcgcgcagggcgaccgcgtagtcgtaggtgcgctcgtcgcccatcacgcccacgctgcgcatgttcgtcagcgccgcataatactggctgatgctcctgtccagcccggccttcgcgatttcctcgcgccagatcgcgtcggcatcctgcaccatagcgaccttctccggcgtcacctcgccgatgatgcgcaccgcgaggcccggccccgggaacggctggcggccgacaaggtattccggcagcccgagctcgcgccccgcctgccgcgtttcgtccttgaacaggtcgcgcagcggctcgatgatctctttgaaatcgacgtaatccggcaggccgcccacgttgtggtgcgatttgatgaccgtgctctcgccgccaaggccgctttccacgacgtcggggtagatcgtgccctgcgcgaggaaatcgacggcgccgagcttccgcgcctcctcctcgaacacgcggatgaactcctcgccgataatcctgcgcttctcctccggctccgcaacgccggccagcttcttgtagaaccgctcgcgcgcgttgacgcagataaaattcatatcaaaccgcccgttcggcccgaacactgtgcagacctcctcggcctcgttcttgcgcagcagaccgtgatccacgaacacacaggtgagctgcctgccgaccgccttcgagagcatcgccgccgcaacggacgaatcgacgccgccggaaagcgcgcagagcaccttgccgctgccgatcttctcgcgcagcgccctgacgctcgtctcgacgaaagagtccatcttccagtcgcccttgcagccgcagacgcggtagacgaagttcgaaagcatcgccttgccctcctgcgtgtggagcacctcggggtggaactgcagcgcatagagcttcttctcgggcttttccgccgccgcgaccgggcagttgccggtataggccgaagccgtgaagcccggcgcgatcgtctcgacgtaatcgttatggctcatccagcagaccgtctccgggctgacgttgtggaaaatctcggaattcgtatcgacgtgcacgagcgttttgccgtattcgcgctccggcgccgtgcacacatggccgccgagcagatgcatcatgagctggcagccgtagcacaggccgagcactgggatgcccagctcgaaaacagccgggtcgatcgtcggcgcgccgtccgtatagacgctgttcgggccgccggtgaaaatgatgcccttcggattttccgcgcggatcgcctcaagaccgacgcggtaggagacgatctcgcagtagacgccgcactcgcgcacccgacgggcgacaagctgattatactggccgccgaaatcgacgaccaaaactttttcattcttggccatatggatcatttccttttctgggaattattcaaccgtcacggattttgcaaggttccgcggcttatcaatatcgcagcccttcatggaggccacgtagtaagcaaaaagctgcatcggaatcaccgaaagcgagggcagcatgaacgggctgatcttcgggatatagaacaccatgtccgtctgcccctcgatctcggcgcggtcctcggtcgtgaggccgagcaccacggcgccgcgcgccttcacctcgcggatattcgacatcattttgtcgaacagccgcccgtccgtcgcgagcgcgatcacgagcgtcccctcctcaatcagggaaatcggcccgtgcttcagctcgcccgcggcgtacgcctccgagtggatgtaggagatctccttgagcttgagcgaggcctccagcgacgccgcgtaatcgacgttgcgcccgatgaagtacatgtcgccggcgttaaaatactgcgaggcgaagaactggatgttctccttgtgcgcgagcatgcgctcgatctggtcgggaatctgctcgagctctgcgatataacggtcgagctcttccgcagtcaggcggccgagcttctcgccgatgtagagcgccagcaggtagacgaccgcgagctgcgtgctgtacgccttcgtggaggcaaccgaaatctccggccccgcccacgtgtacagcacgtcgtccgattcattcgcgatcgtgctgccaacgacgttgacgatcgagagcacgcggcagcccgcgcgctttgcctcgcgcagcgcggccagcgtatcagccgtttcgccggactggctgatgatgatcatcagcgtgtgctcgtcgataatcggctttctgtagcggaattccgaggcaacgtccacctcgaccgagatgcgcagcagctcctcaaacgcgtactttgcgacgacgccgacgtggtacgccgtgccgcaggcgacgatacagatcttcgtgaagctctgaagctgctccgctgtcagcgtgatgtcgtcgagcacgacgcgcccgccgcggatgcgcggcgcgatcgtatcccgcacggccttcggctgctcgcagatctccttcatcataaagtgctcgtagccgcccttttccgccgcctcaatatcccactcgatgtgctccgccgtcttttcgaccggctcggcgtccgggttgaagaacgccactgtgtcgcgcgtgagcaccgcgatctcgttgtcctttaagcggtagatgtcgcgcgtgcgcgagaggatcgccgggatgtcggaggcgatgaagttctccccctgccccacgccgatgatcagcgggctgtccttgcgcacgcagaacaggcggtccgggtattcggcgctgatgatgccgagcgcgtagcttccctccaccttcgagataaccttcgcgatcgtctccatgatgtcgccgtggtcgtagtattcgagcatctgcgcgacgacctcggtatccgtttccgaaacgaactgcacgccgcggcgcatcaggtggtttttgaggtacaggtaattttcgatgatgccgttgtgcacgacggcaaatttgccgccctcgctcgtctgcgggtgcgaattgacgtcgctcggcgcgccgtgcgtcgcccagcgcgtgtgcccgatgccgagcgtgcccgccaccgctttgccgccgtcgatcaggttgctgagcacgcggagcctgcccttcgccttcgccacgcgcaggccatcctccgaatagaccgccacgccggcggaatcatacccgcggtactcgagcttctcgagcccctgcagaagaatcggcgccgcctgttcgcttccgatatagccgacaataccacacataccaaaatcccttcctttccgctgccgcacgatttgcggcagatcagggaaagcgggcgacaccgcgcccgctttccagctaaaaccaattatttgtagatgatgtcctcgcgcgccgggccgttcgagaccatcgtgatcggcacgccgatgtgcttttccgcaaattccacatagcggcgcgcgttctcgggcaggtccgcatagttgcggatgccgccgatatcgcacttccagcccggaagcacctcgagaaccggcttgcagcgcttgagctccgtcgtcgtcgggaaataatcgatgcgcttgccgtcgagctcatacgccacgcagaccgggatctcatcgaggtagccgagcgcgtcgagcaccgtgaaggccacgctggtcgcgccctgcgcctcgcagccgtagcgcgccgcgacaaggtcgagccagcccattcttctcggtcggcccgtcgtcgcgccgtactcgccgccgtcgccgccgtgacggcgcagcgcgtccgcctcgtcgccaaagatctcggagacgaattcacccgcgccgaccgcgctcgaatacgccttgacgaccgtgacaatctcctgaatcgcgtacggcgggacgccgcccgcgccgatcgcgccgaagccggcgagcggcgaggaggaggtgaccatcgggtaaatgccgaggtccggatccttcagggagccgagctggccctcgagcagaatcgttttgccggccttcacggcctcgtgcagcagcgtgaacgtatccgccacatacggtgcgagcgctgccttgtactccatgagcttcccgtaaatttcctcgcggtcgagcggctcggtcttgtagaggtccttgtagagcacgttcttgagctcgagcacgtggtcgattttctccatcagcgcatccttctcgtcgaacagctcgctgacctggaagccgattttcgcgtacttgtcggaataaaacggcgcgatgccgctcttcgtggagccgaaggatttcgccgcgaggcgggcctcctccatgccgtcgagcgccttgtggtagggcatgacgatctggcagcggttcgagaccacgaggttcggcatgggtacgccgcggtccgtaacggccttgatctcgtcgatgaagttctcgacagacagcgctacgccgttgccgatgacattgatgatattctttctgaaaatgccggagggcagctgatgcagcgcgaatttgccgtactcgttgatgatcgtgtggccggcgttgctgccgccctgaaaacgcacgacgatgtccgacgtctccgcgagcatatcggtgatcttgccctttccctcgtcgccccagcaggcgccgacgattgcctttaccataatcgttcaagcctttctctacatgtatattttttgctccgcccttctatgccgcagatgcggcgggcggattccgttttacaggttgatttcggcggtctccgtctccgtgtcggcgtagcggctgagcaccggctgcaccgtgtcgcgcaggaagagctccgtctggcgcggcgcgcggcccacatacttgtgcgggtccacgatgcctttgagctgctcgagcgtcacgccgaagatcgggtcgcccgcgatgcgctcgagcaggtcgttttcgccgccctcctccttgatgaccttcgaggccgccatcgagtggacgcgcacgtgctcgtgcagctcctgccggtccgcaccgcgctttgcggcgtccatcatgatgttttcggtcgccataaacggcagctcgcgcatgaggcgctgctcgatgaccttcgggtaaacgacgaggccgtccgccacgttcatcacgaggttcaaaatcgcatcggtcgcgaggaacgcctccggcacgctgatgcgcttgttcgccgaatcatcgagcgtgcgctcaaaccactgcgtcgaagccgtgatcgccgggttcagcgcatcgaccacgacatagcgtgcgagggaggcgatgcgctcgctgcgcatcgggttgcgcttgtaggccatcgcggaggagcctatctggttcttttcaaacggctcctccacctccttgaggtgctgcagaaggcggatgtcgttcgagaacttcgccgcgctctgcgcgatgcagctcagcacgttcagcatctggctgtcgagcttgcgcgggtaggtttggccggaaacggcgaagcacgtctcatagcccagcttttcggcgattttgccgtcgatcttcgcggccatctcgtcgtcgccgtcgaacagctcgaggaagctcgcctgcgtgccggtcgtgcccttcgagccgagcagcttcgccttgccgatctgatactcgacgtcctcgagatccatcaggaattcctgaatccagagcgtcgcgcgcttgccgacggtcgtcggctgggcgggctggaagtgcgtgaaagcgagcgtcggcaggtccttgtactccgccgcgaacttcgaaagcacgcggacgacgttgacgagcttcttccggacgattttcatcgcctcggtcatgatgatgatatcggtattgtcgcccacgtagcagctcgtcgcgccgaggtggatgatgccggccgccttcgggcactgctggccgtaggcatagacgtggctcatcacgtcgtggcgcacgaggcgctcacgcgcttcggcgacctcataattgatgtcgtcggcatgcgccttgagctcgtcaacctgctcctgcgtgaccggcaggcccagctccatctcgctctccgccagcgcgatccacaggcggcgccatgtcctgaacttcatatcgggagagaaaagatatttcatctcctgatcggcatagcgggaggacagtggggattcataggtgtctctcatggggtcgatcttcctttctgctctggagccgcgcgccgcgctcgggcgggagcggtccgtattctcggaacccggaacacattcggatacatgataattctataaaaaaccgcagcgattgtcaatatttttccgaaaagcacggtgcaaggattcgtacaatttcctttgccgcgggcggcaaatactgttgttttcatagaaaagcagccaaaacttgcaggaaacaacacagcttcatgcagaattcgcattgctcttttaaattttttgcgcgaaagatattgcaaattcggcgcatacgtgatagaatatccccagatttcccgcggagcggtttccgcacagtttgcaggattcactttcggaagttgcgtttcaccgggatttatgtcctcaaattttgtacaaggagcgattcgtatgtcttatgtcagcgaacagcttgccgagctcaagcggctcaacgcaagcgaacccgaattcatccaggccgccacagaggtgctcacctcgctggagccggtcatcgaagcgaacccgcagtacgaggccgccggcattttagagcgtatcaccgagccggagcgccagatcaagttccgcgtgccgtgggttgacgacagcggcaaggtgcacgtcaaccgcggctaccgcgtgcagttcaactccgcaatcggcccgtataagggcggcctgcgcctgcacccgtccgtcaacctcggtgtcatcaagttcctcggcttcgagcagatcttcaagaattccctgacaggcctgccgatcggcggcggcaagggcggctccgatttcgacccgaagggcaagagcgaccgcgagatcatggcgttctgccagagcttcatgacggagctctaccgccacatcggcgcggatacggacgttccggcgggcgacatcggcgtcggcgcaagagagatcggctatctctacggccagtacaagcgcatccgcaactgctatgagggcgtgctcaccggcaagggcctcacctacggcggctcgctcgtccgcacgcaggcgaccggctacggcctgctctatttcacggacgcgatgctgaagaagaacggcatggagctcaagggcaagacggtcgtcatctccggcgccggcaacgttgcgatctacgcggcggaaaaggcgatcgagatgggcgcaaaggtcgtcacgatgtccgattccaccggctggatctacgacgcggagggcatcgacctcgcggcggtcaaggagatcaaggaagtcaagcgcgagcgcctgaccgcctacaaggcctaccgcccgaacagcgagtaccacgagggcaagggcgtttggaccgtcaagtgcgacatcgctctcccctgcgcaacgcagaacgagctcaacaaggaggatgcggaaatcctcgtcaagaacggcgtgcaggccgttgccgagggcgcaaacatgcccacgacgctcgagggcaccgaggtgttccagaaggccggcgtgctcttcgcaccgggcaaggctgcaaacgccggcggcgttgcgacctctgcgctcgagatgagccagaacagcgagcgcctctcctggagcttcgaggaagtcgatgcaaagctcaagggcatcatggagaacatcttcaagaatgtcgatgcggcggccgagaagtacggccacgcgaagaactacgtcgtcggcgcgaacatcgccggcttcgtgaaggtcgccgacgccatgctcgcacagggtgtggtctgatcccgcttccataaaatcagcataaggggcgccgcaggcaaatcgatgcctgcggcgcccctgcaaatttaaagaaagtcggagcgcccgtcccccacaccggggatcggcgctccgccctttctattctgcgtggagccgtatccgcatccggcccatacccggacagcgccgcataaagccgtcctccgccgcacaccgttaatccgggtattggcggtgctccagccgccggaacagccgcgcgaggacaatgaccgccgcggccgctagaataacctccgccacgagctgcgcatacgcgaggccgtacagcgggaaaagccagttgagcaaaaacagcgccgggatctccagcacgatcttgcgcaaaatagcaaagacaaacgcgttctttccgagaccgcacgcctgaaagacgcccaccgcaaggaaatccatgcacagaaacggcatcgcaaggcacatgccgcgcaggaacgccgtgccgtaggcgacaatcccctcgttctgcatgaacatgcgcacgagactgtcggcaaagaacaggtagccaagcatcacgagaatcaggaacatgagcgagatccgcgcggtgaagaaaaatgtctttttcatgcgccgcgtgttgccgctcgcgtagttgtagctgatcagcggcatgatgccctgcgagatgccgagcgcgatctggaacggcaccgtgttgatcttctgcgcgatgcccatcgccgcgacggcgtctgaaccgaaagaggccgcaaagttgttcagcaccgtcatacccgtcacattgagcaggttttggatcgaggccggcacgccgacgccgcagacgccgcggacaatgcgcaccgtggggcggaactgccgcgggctgatgcacacgtaggtgcgcccgcgccgcacgaacagcagcacgaagaagtacaggcaggcgacgcagttggagaggaacgtcgcgcagcccgcgcccgccgcgccgaggttcaggccccacggcaggatgaaaatcgggtcgagaatgatattcaaaaagcagccgctcattgtgccgatgcttgcgtgcagtgccgcgccctcggcgcgcacgaggtatgccatcaccacgttgaggatcgccggggccgcgccgaagctgacggtccacaggaggtattcgccggtcgccttcgccgtctcctcgctcgcgccgagcacaacgagcagcggcgcgctgaataccgtgtagagcagagaaaacaggatgccgctgatcagcgcgcagtaaaagccgaacgccgagcttttatagacggtatccatatcgccgcgcccaagcgcgcggctcatcatgcttgagctgcccacgccgaacaggttgttgaccgcattaaaggccagcagcaccggcgcggccagcgtgaccgccgcgttctggatcgggtcgttcagcatgccgacaaagtacgtatccgccagattgtagagcaccatgacgagcgagctgatcaccgtgggaatcgcaagctgcatgaccgccttggggatcggcagactctcaaatagttctgtttttttcgcatcttccattgccatcaccagtccttattccttgacccggaaaagcggcgcaccgcttccccggcggcacagccgcagccgcgccgtttcgcattcattgtatggctgtatatcacgcaaagcggtctaaaatcagcttgcagcagccgtagatgcccgcatcgttgccgagcgccgcgagcgcaaagcggatgccgcggttcgggtagaacgcatacttcaaaaagcctgcgcgcgcgccctcgagcagcggcgcgcccgcgcgggatacgccgccgccgatcacgacggcctccgggtcgctgaccgtgcagcccgccgcgaggaagaagccgaacgcgtcgtacaccgtctcgagcgccgcctgcgccgcagcgtcccccgccgcagcgctgtcgaacacgatcttcgccgtcagcttctccgcgccgcgcatcgcgctcggctgctcggggtgcgccgcaaggtactgctttgcgacgcgcacgacgcccgtcgccgaaacgtactgctgcacgcagccgcggcggccacaggcgcaggtctccggctcatcgcggttgatgaccatgtgcccgagctcgccgcccgcgccgtgcgcgcccgcgacgaggtgcccgtccgcgatgaccgcaccgccgacgcccgtgccgagcgtcacgaacagcatatccttacagcccttgccgccgcccatccagtattcgccgagcgccgcgacgttcgcatcgttcgcgctctcgaccggaaagcccgaaatgcgcgccagcgcctcgctgacattgaacacgccccagcccagattgacgcagcggttcaccgtgccgtccgctgtgacggggccgggaatgcccgcgccgatgccgagcacgtccgcccggctgatgccgcgccgcgccatgcagccttcgaccgccgcggaaacgtcccgcagcacggcctcgcccgcgtcctcgatcaccgtcgggatctcccacttttcgagcagtgcgccgtctgcctgaaacaggccgagcttcacggttgtgccgccgatatccgcgccaaatacatacttcatttttctgtcacctcttcttgttgatcgccgcccgcggggaacgccgtccccgcccggccctgtgcctttcgctgtgcctcgtccgcccgcagcgcagccgtccatgccgcgcggaacgacgcgatcgtccggtaccgcgccccgcgcgcatcgcacaccgccctgaccgccgcacggtaagccgcctcgccgagctgccagtccgcgcgcgcccggctgtagccgccgaagagcgcgaaggccatcgcccccatcgcgtacacgttcgtcacctcgtcgatgaccgcgccgcgcgccagctcctcgggcgccatgaatctcaggctgccccacatgcggcccatctcgttcgtaaacggcgcctcgcggtagaaatcgatgtcgcacagcaccgccttatgcgctttcacgtcgtacatcaccgtgccgtcgtaaaaatcgacggcggcgtaccccttttccgcggcgtggatgtggaattggaggatgccctcaaacgcgcgcaggcgctccgcctccggcagcgccataaagcgcttgtgctgcgccgggtacatgcggcccatgctcacgccgtccgtccagcggaacagcaggccccagccgccgcccagcgggccggattcgatgagctcgaccagattctcgtgccgcagcgtccggtaaagcggtgcggccaccttcaggcttttgaccgccgcttccggcgaagccgtgccccacaccgtcggcgcgccggcaaatttcagaaaataccgcgcgccgtccttttcgaggccgaagcagatgttgccggaatcctgatcgtcgtagaccttgaacacgcgcccataagcgccgagaaagctgaaatcgaacggctctttcaggcggtagggcacgccgtccgtctcctgcacatacacgcccgggatgtaccagcttggcaccacgcgcgtcatgcccgcgtacccgccgagcacctccttcgcctgattcagcatcgtgtcgatctccccctgcccgaacgggatcgcccacgagacggaggaaagcaggttgctgccgaggtagagggccagaagccgccaaaattccatcggcggctcgccaccgaaatagccgtttaaaagccccgtcgcaaaatgcgggcttgcctgcgcgcaccacgggatgcggttgaattcctcccacgggtcgccgaagtcgtagcggtcgaaatcgatgatcctaagtttccccgcgcggtcgagcatcatgttgccgacgtggtagtcgccgtgctggaagcactgcgggcggttttcgagcaggccgcggttttcctcgatatacgcgatgatcgcctcgccgccctcgaattggatcgggcagcttcggaaaatctcgatcttccggctcgccttcgcgttgaagcgctccgcccagtcgggcacattgtccggcgccgggatgctgtggatcttttggaggatctcccccgcctgcacgccgtacacgtactgctccacatccggcaggtcggcgagcgccgcttcaagctccacgccgtcgatccactcgaataggctgtaagtgccctcggcgcacgtgccgaagccgagcggcgcgcacatcggcacgccgagcgacgcggtgcgctgtgtcagctcgaacatctcgcgccggtttgcgtccttgcccggcggcgtgatgcgcagcaggcaaagcttgccgtccttgtccgccgccttgtactttacgtcgctcgaccagcccttttcgatcggctccagccgctcgagcccgtgcttttccctgaaatacgcgcaggtctcccggttcatctcttttccccgccttccgattcaaaattgcatatattatagcacaaaatgcggggcactgtaaagccaagcctgtgaaagtcgccgttgaaaaaactgccggattgtggtatgcttactggcgtaacccaaacggcagccgcccgacgtaccgcggcgagccggtgcggatgaccgcaaaagccgggaaacccccggcggctttcgcaccggggaaagcggacagacggcagctgcaacatagccaatatagattctttctcaaagcgcgaaacgcgcaacccaagggcgcccggaaaccaacgatgcgcggcgccccaacagaaaggattgaaccccatggaggaaaacacagcaaagaaagagagcaaaatcaaaaagtatctgcaccggtatttcatcgacgccatgagcgcgatggcacaggggcttttcgcctcgctgctgatcggcacgatcatttcgacgctcggcacgcagctcaatatcccggtgctcgacgagatcggcggctatgcgaaatccgctgccggccccgcgatggcggtcgcgatcggctacgcgcttgaggcgccgccgctcgtcctcttctcgctcgtcgccgtaggcggcgcggcaaacacgctcggcggcgcgggcggccccttggccgtgctcgtgctcgcgatcgtcgcggcggagctcggccggctcgtcagccgcaaaacgaagatcgacatcattgtgacgccgctcgtcaccatcttctcgggctgcggcctcgcctacctcatcgcgccctatatcggcgcggcggcctcaagcgtcggcggcctgatcatgtgggcgacggagcttcagccgctcctgatgggcatcatcgtttcggtgacggtcggcgtcgcgctgacgctgccaatcagcagcgcggcgatctgcgcggcgctcggcctgaccggccttgcgggcggcgcggcggtggccggctgctgcgcgcagatgatcggcttcgcggtcatcagtttccgcgagaacggctggggcggcttcttcgcgcagggcatcggcacctcgatgctgcaggtgccgaacatcattaagaacccgcgcatctggatcgcgccgacgctggcctcggcgattacgggcccgctcgcgacctgccttttcggcatgcagatgaacggcgcgccgatctcaagcggcatgggcacctgcggtctcgtcggccagatcggcgtttacacgggctggctcgcggacatcgccgccggcacgaaagcggcggtcaccgcgatggattggaccggcctcgtgctgatctgtttcattcttcccgccctgctctcttttgtctttgatctcgtgctccgcaaaatcaactgggtcaagccgggcgacatgaagctcgatatttgatccgcctctttcaggcatccgacgcgccgcagccggcgtttcgggtgctttttctttccgaaagggcttgcatttccgcgcgcggtgtactatgatgatgccagaatatagaaaccgggaggaatccacatgcagttcacatacctcggcaccgcggctgccgaaggctggccggccgttttctgccgctgcaaatactgtctggaagcgcagcgcctcggcggcaaaaacatccgcacgcgctcgcaggccatcgtcaacgacgatcttttaatcgacctgccgccggacacctacctgcacaagctcgcccacgggctcgatctcagccgcgtgcggtatctgctgcttacgcaccgccatatggaccacttctacccgcaggagctcaccgtgcgcggctcgtgctacagcctcgatatggtcagtcccgacctcgacatctactgcgcggcggagacctacgctttcttcaagcagtgcaccgactgggagatcgaccgcgaaagcctcgaccacctgcacttccatattttgaaggccttcgaacccgtgcaggccggcccgtacacgatcacaccgctgccggccacacatatgtcgcctgaacacgagccgtttgtctaccatatcgaggacgcagatggtacctcgattttctacctgcacgacagcggctactacgcccccgccgtgtgggattactttaaggcgcagaaaaagagcgccgacctcatcagcttcgacacgacctgcggcgaagaggacacgcacctcaggggcacgcacatgggttttcccgacgtcgttcgcgtgcgcgatgagatgcgcggaatcggccttgccgacgcgcacacgcactgcgtcctaaaccacttctcgcacaacgggcatctgctgcaccacgagctggaggcgctggccgccccggcgcagctcgaggtctccttcgacgggaaaacgctcctgctttgagcgcgccctgccgcacgccacttcaaaaccgggcctgcacaaataaatatcccccggcgaagccgggggtatttcatatgcgggcaaagccctatattactagcggcacgtgtcacgtcacgttggtacgatctggcagccgcgaaaagtttgttacttgctactcgtaaacgagtcttttagaagtttcccatcgtcagctgttcccctgctttgtcttcttctaattggttttgaatatattcttgtatcttttttgcatttttccctgctgtgtccacgtaatatcctctgcaccaaaattcccgattccgatatttgtatttcagctccggatacttttcgtagatcatcaggctgcttttccctttcagatatcccataaagcttgatatcgctactttcggcggtatttctaccagcatatgtacatgatcgggacatacttctgcttccacaatttttatctttttccattcgcaaagtgttctcagtattttccctacctctcgtctcttttctttgtagaacactttcctcctgtacttcggtgcgaacactatgtgatatttgcaattccatttcgtgtgtgataaactgtttgtgtcgttcatttgaacgtcctccttttgttgtccttgcagttgccagaccgcaagcctattttacaacaaaaggagtttttatttctacatcatcggcacaagccttcttttgaaccacgcgactatcgcgtggttttctgctgacaaaaatgcgcgccgcctttccacggcgcacacgctgtatgcaatttacatgtattttttgataaagttcaaacaatcattgcgcaaatacacaaaagaagagcagaatgccggtacaaataccgcttctgctcttcctcttttttctgatttacaatcacttgctgttgcgccggaccgcttgctcaatcttcgggagcagctcctcgcggtcggcccccttcgtgtacttgaacatggccgcgacaatctccggaatatccgccgccgtgtagtgctccgtcgtggagatctgctgcgcaaaatactcgttccgcgtgatcatcggcgcaaagcggcgcgcattcttgcggcccgcgccattattcatgaaagctgcaataaactgatactgcatcaggttgttgatgatgacatggaacgaattcttcgcaaagagcggatcatccgggtcgcgcagcgcgatttccatgatttcggcacggttcagcggcctgcctgcttcccacagcagctgcatcattgccaactccgaatttgtcagccgcacatgcacttttttgcccttcatacaacgtcctccttaggtaattttcgctcgaccttttactatgaatattctcacagatccattattatttatagtatatttttatttttacaaattgtcaagatgtatataagagaaaatcaatgaaaaatcgaagaatttcgacaacggacgtttatcggcctgcatccgggcttttttcccgccgcacaactagaaaagacgcatgctgttttgcaggcggcccggcgctgcgcgcccgcaggccgccgcgcgcgggtatcgcttctctgcccgcccggtttatttttctgcctcgttttcaaggaacagcgccttgaaatacggcaggctctcaatccacgcgcagtagtcgtgccattcgtcgagcttgtggtgccggcgcgcaaaatacatgctcacaaggttctcatacgtcatcgtgcaggtgcgcatctggttgtagctcgacggcagaagctggatgatgctgtaccagaccgccttgtccttcgtctccagatagcgcaggcgcagagcctcgagcgcggcgatcgtcccctcgaggctctcgcgcgcttcgggcagcatgcgctcgcagctgaaatctgccgcggaaaagggcttcgcgtggatcttgtgcatcgtgctcgtcgaatttgcggtggtgccgaccttgtaggtgtcgaactccttccaccagtacagcggcgccgtcagatcgacagagacgaaaatctgccggataaacttgcggtggtcgctgccggccgcgcacaagcgcttcgcgaggccgaggtcattttccccgaacacaaaggcgccgtccggctcggtgtggctgtccatgcgattccagctgttcagcgggttgcgcgcgccgcgcatcgcattttcaaaattcatgacacttgttcgctcgatttgaatcatatggatctcctttactcggttatttgtggtattttgtgcccgcattgatcgaaaacgcgcggtaaagctgctcgcagagcatcacgcgcgcaagctggtgcgggaaggtcatcggcgacatggagatgcgcctgccgctcgatttgacggaatcgtgcagcccgtgcgacgagccgatcacgaaagctaggctgctcgcgccgccgacggccgccgccgcgatttccgccgcgagcttttcggaggaaagcatgcgtccctcgatgcagagcgcatagaccgcgctgcgcccggcagccgccgcgatcgctttgctttcctccgcgagcgcgcgctcgatctccgccgcacccgggttctgcggcaggcgcgcctcgttcagctcgacgacggaaaaacggcagaacgccgaaagccgcttcgcgtattcttccacagcctcgcgccagtaccgctctttgagcttgccgacgcagatgattttgacctcaagcatcgcgcacctcagaattccaccgtgcgcccgtcgaggttctcgaccggtgcaacgtccagtatgtagccgctttcctcctcgatgccggccatctgcatgccgcacaccgccgtctgccgcgcaatgtccggcgtgttgttctcccggctcaggtgcgcgagcagaaagcgccgcgtgccgttctcgtacagctccggcagcagctcggcgcaggcggcgttcgagaggtgcccgcagtccgagaggatgcgccgcttgagcgcgtagggatacggcccggtgcgcagcatgccgacgtcgtggttcgattcgatcacggcgagatcgacgcccatgagcttttcttcgatctccggcgtgacgcggccgaggtcggtcgccaccgccgcggtccttccgtccgccgtgcggatgcggtagcccagcccctccgcgcagtcgtgcggcgtgcgaaacgcctgcacctgcatggcgccgagctcgagcgtgccgtcgatcgtgtacgccgggaacgagccgtcgagcacgcgcattgattcgagcgccgcgagcgtgccggccgacgcgaacaccgggatgttgtatttcgaagcaaatacgcgcaggccgctcacgtggtccgagtgctcgtgcgtcaccagaatgccgttcaccgccagcgggtcgatgccgcagcgcttcaaaatattcgcggtctggcgcgcgctgcgccccacatccaccagaatgcccgccgattttccccctataaaatagctgtttcccgcgcttccgctgtacagcgcgcaaagctctgccatccgtccatctccctttgctttcatcataaaaaatgccctgacagagatccgtcggggcgagtgccccggccttgcagccggagccgtaattatccgattttctcgttgctgccatcctgcgggtcgatgcgcaggtacatgtccgcgccgagcccgacgaacttctccacgatgtcctcgtagccgcgctggatgtgctcgatctcctcgatcttcgtcgtgccgcgcgccgcgagcgccgcgatgatcatggcggcgcctgcacgcaggtcgaccgcgcggaccggcgcgcccttgaggaaatcgacgccctcgatgatcgcgctcttgccctccaccgtgatctgcgcgcccatgcgcttgagctcctccacatagcggaagcggttttcccagacgttctcgttcaggatgctcgtcccctccgcgagcgcgagcaccgccgcgatctgcggctgcatgtcggtcgggaagccggggtgcggcatcgtctttacgttgcacttgcgcagcggggtatcccggcgcacacgcaccgcgtcgtcgtattcgatcacggtgacgcccatctccatgagcttcgccgtgatcgactcgagatgcttcggcgtgacgttcttcacaaggatgtcgccgccggtcgccgccgcggcggccatatacgtaccggcctcgatctggtcgggaatgatcgaatacgtgatgcccttgagatgctcgacgccgcggatcttgataacgtcggtgcctgcgccgctgatgttcgcgcccatcgagttcaggaagttcgcgagatcgacgacgtgcggctcacgcgccgcgttctcgatgaccgtaaggccccgggccttgacagctgcgaggatgatattcatcgtcgcgccgaccgtcaccatatcgagataaatgtgggcgccgcgcagcgcgtcggccgaaacctcgatcataccgtcgttgagcgtataggtgcagcccagcgcgttgaagcccttgatgtgctggtcgatcggccgcacgccgaaatcacagccgccgggcagcggcacaaccgcgcgcgaaaaacgcccgagcagcgcgccgatgttgtagtatgagccgcgcatcttgcgcccgagctcgttgggcacgacgttcgtttggatcgtcgtggggtcgatctccacggtattgcggttgatccagcgcacctcggcgcccatctccgtcaggatccgcgcgctcagcttgacatccgaaatattcggcacattctcaatgcggcagggggattctgccatgatcaccgccggaatgatcgcaacagccgcgttcttcgcgccgctgatcgtcacctcgccggaaaggcgcttgccgccccgaacaataaatttatccacgataattttccttccaagtctttttgccgccggtcccaaaccggtttcatttccgaaacggaagacctgcgcagccaaagccgacggcgcatccgctcatcttatataaaaatcaagtgaagtctttgcttattatgaccgataactatgataatacacaacggtaaaaaagtcaatatcttgcaggaacttcggacctgttttctgcgattatgtaaacaggcttattctgttttcaacaaaaaaggcgagagcttacgactcttttttgaaggaaatgggcttttcctcaccggccaagatacgcttgatgttcgctctgtgcttgacgatgaccgtggcgccgatcagcgccgccaccgcggtcgccatcgcgacatagaagcccgggaggccgccgattttataatcgataaaaaatgtgatgaaaaacgtgacgatcgggtacagcaggcagccgcagatcgaggcgagcgagaccgttttcttccacgcaaaaaccagcgcgaaaaaggcgaagcagatcaggaacacgcgccagtccagaagaaggatcatcgccgccgccgtcacgacgcccttgccgccgcgaaagccgaagtaaagcggatacatatgcccgatgatgcagcagaagcccgccgcatacatgcccagacgcgccagcaccgggtcgatgccgttcgccaagcagatgaaatgcagcgcgtaatagccgatcgcaacgctcagcgcgcacttcaaaaagtcgcagagaaaggtcagcgcggaggctttttttccggcgacgcgcagcacgttcgtcgcacccgcattgccgctgccgtggctgcgcacgtcctcatgcgcaaaaacgcgcgtcaggatgatcgcaaagctgatgctgccaagcaggtagcccgccgcggccacgagcagcagcgggagaatcagcgcttcaaaatttgccatacatcacccttccttctcgccgcgctcgcgcacgatcatgcgcaccggcgtgccttcgaggccgaaaatctcgcggatccggttctcgagataccgctggtaggaaaagtggaagagctccttcgagttcacgaagcagataaacgtgggcggcttcgtcgaagcctgcgtcatgtagtagatcttcaggcgcttgcccttgtcggtcggcggctgcacgcgcgccgtcgcctgcgcgaggatgtcgttcagcgtgccggtcgtgatgcgcatcgcgttgctcgaggccacatggcggatcagctcgaaaagccggtcgagccgctggccggtctgcgcggagataaagatgatcggcgcgtaggacatgaacgcgaaatccttttcgagcttcgcgcggtacgtctgcatcgtcttgtcgtccttctccactgcgtcccatttgttgaccgcgatcacgcagcccttgccggcctcgtgcgcgatgcccgcgaccttcgaatcctgctcggtgaagccgaccgtcgcgtcgatcagaatcacgcagacgtcggcgcggtcgaccgccatctccgcgcgcagattgctgtagtgctcgatggaatcctccacgcggctcttacggcgcaggccggccgtatcgatgaaggtgaacgtgccgaatttgttctcgatcgtcgtatccacggcgtcgcgcgtcgtgcccgcaatatcggaaacgatgcagcggttctcgccggaaacgcggttgacaagcgacgacttgccgacgttcggcttgccgataaccgccaccttgatgatctcgctctcctcttcctccgcctgcgcctctggcagatgctcgagaacggcgtccagcagatcgccggtaccgtggccatgcaccgaggaaacctgcaccgggtcgccgaggccgaggttgtagaactcgtagaaatccgccggcggctcgccgaccgtgtcgcatttattgacgcagacgacgaccggtacattgctgcgctggagcatctgcgcgatgttgaggtccgtcgccaccatgccggtgcgcacgtcggtcacaaagacgatcacatccgcggaatcgatcgcgatctgcgcctgcgtgcgcatctgcgagaggatcacatccttcgattccggctcgataccgcccgtatcgacaagggaaaaccggcggtttttccactcgcactcgccgaaaatacggtctcgcgtgacgcccggcgtatcctccacaatggaaaggcgctgcccgatcagcttgttgaacagggtcgatttgccgacgttcggtctgccgacaatcgccacgatcggttttgacattccgtttcctcctttactctatcgtttccggcagcgggcctaagatgtcccgcagctcgccgccggcatccttctgcatgcgttttgccggaacccccagcgcgcggccgagcgcttccagcgtcatatcgtccaaaaacacgtcctcgtcggccatcagcatcgcactcgggatcaaaatctcgtcgccgaggttttcatcacggagccgccgcacgaggtcccgcccgaccaaaaggccggtcacatcgaccgtgccgccgaaaaagtcgtttttcaccgggaccagattgatctcaatccccggaaactgcgcacgcacgcggtcgaaaaggccgttcaggaactcgaacgccgcctcgcccgtcgggatcgtcacgcgccggcggagcctctgccccggcagttcctcgagcgcccaagtcagctcctcctccagatcgcgcagcatgccgacgccgttttcgatctgcgggaaatcctcgtagaaatcgtacggcggcagcgcgcgccccgcaatcaggtagaattcgtcgctcgggtagaccgtgcgcatgccgcgttccgccttgaagcggtcgccccagcgctcgagcacgtcgatcgccgcgccggctgaggcccggtcaaacggcacgagcgggtacagcccctcgcggtagcgcgtcagccccacgggcacgcaggcgacgctttgcaggcactcgccgaggccgcgcatttcagaaagcgtgtattcgagctcggcgccgtcgttcaggccggggcacagcacgatctggcagttcagccggatgttgtgcgctgcaaggcgccgcacgtggcgcagcgcgtcgcccgcaaagcggttgtgcatcattttgcagcgcagcgcgggattcatcgtgtgcaccgagatgttgatcgggctgatgtgcatctcgatgatgcggtcgatctcgcggtcgtcgatattcgtcagcgtgatgtagttgccgaagagaaacgagagccgcgcgtcgtcgtccttgaaatacagcgtctcgcgcatccccggcggaagctggtcgatgaagcagaaaacgcacttgttgcggcatgcgcgctgcttgtccatgaggtacgtctcaaattcgaggccgagcgcgccgtactgcgccttgacgattttttcctccacacgccgcccgtccggcttttcaaagacaacggtcaggtgcgtgctcgtctcgcggaagcggaagtcgaggatatcgccgatcacatggccgttgatcgagatcaggctgtcgcccttttccatcccggcgcgttccgcaaggctgcgcggctcaacgccgaatatttttaccgccataaaatccgcctcccctccgcgcgcggcgccgcatcttcaaaaaaacaatagagaaggagcaaaaatctgccccttctctatcttgcacaatattgtttcaggcaaaattatgcttcctttttaacaacttctctgccgttgtagtaaccgcagttaccgcaaaccctgtgaggtgtcttatactctccgcactgcgggcatttcataagggcaggagcgttaagcttccacacgttggaacgtctcttattctgtctggcactggacacttttctcttgggtaccgccatcgtcagcacctccttatagtaaactaaatctttggtgatccaaaatcattggagcagcgcgcgcagggcctccatgcgggggtctgcctgctgcttcgcacaggcgcagtcgccttcattgaggttcttcccgcaggtcgggcaaagccccctgcaatcctccttacagacgtatttcgagggcgtcagaagaatgatgtcggaatagatcagctcgtccaaatcgagcgtttcgccctcgacgacaatataatcgtcgaagtcctcctcatcgttcagcttgttcaccagcacgtgagatatgctgtgcgaaagctccttcctgctctctgtcaggcacctgttgcacggcatcgaaaacgcatagctgacggtgacatgcagctctgcactggacgcaaacgccttgatatcacccacgacatgcaccggggaaacaaacggcttcgcgccgtcgatctccacgccggacaggtcgatcgtgtaatcgatatgctgggaaacgtcctctcccgaaaaatacttcttcaactcgataagcatgggtatcctcataccgtactgatatattataaataccagacgggcttttgtcaaggaaaagtttgaaaaatccggcgggtttccgcccgaaaaaaggcgttcggcgggtctgtctccgccgaagcgccgattttttctgcacagccggaaaaccgctctgcttctcctgccggttttacttgccgacgtactccagcacggactccggaagctcctcctgagcggcggaaatcagcaggcagatgttcgcattggccgtttcgctgagcgccttgagcttcatcgtgagcgcctcaacgtcgctgacgccgttgccggtgatcttcagcgtggaatccacaaacacgtcggtcacgtcgtagttcgccgcgcagatgccgctgacgaagccgacgagcgcgtcgagaccctcgatgctgtacgcatcggaatcgacgagacgggccttgtgggaaatatcatatgtaagcttgaggctcttttcgatgacgacgacgttgccgttcgaattcttgacggcctcgttcgcgagctcgatgagcttcttcgtcttgccggagccctttttaccaattaagagagtgatcataatgaagtcctcctgaatattttatattccgcataaacggatttacgcctgaattattttgaaaggcgcgcttccagcgcttccttctcgccctcgtagccgggcttgccgagcagcgcgaacatgtttttcttgtagctttccacgccgggctggttgaacgggttcacgccgagcatgtagccggaaatcgcgcaggcgcgctcaaagaagtagatgagctggccaagcgtatcctcggagaaatcgggcgcgttcaaaacgatgttcggcacgccgccgtcgttgtgcgcgagcacggtgccctcaaacgccttgcggttgatgtaggccatgctgcggccctcgaggaagttgaggccgtcgacattcgccgggtcgttgccgatgacgatctcgtgcttcggcttttcaaacagcacgacggtctcaaagagatcgcggcggccgtcctgaatatactggcccatcgagtgcagatcggtcgagaaaacgacggacgccgggaacaggcccttgccgtccttgccctcgctctcgccgtagagctgcttccaccactcgttcatcagcgtgtaggagggctcgtagctgaccatgatctcggtgctcttgcccttgttgtagaggatattgcggatcgccgcgtacttgtagcagtcgttctcctcgagattcggattgctgtacgccgcctgcgcctttctggcgcccgccatcagcgcgtcgatgtccgcgcccgcgacggcgatcggcagcaggccgaccgcggtaagcaccgaataacggccgcccacgtcgtccggcacgacgaaggtctcatagccttcttcgtccgcgaggtgcttcagcgtgccgcgcgccttgtcggtcgtgcagaaaatgcgcttcttcgcctcttccttgccgtacttcttttcgatgatctcgcggaacacgcggaacgcgatcgccggctcggtcgtggtgccggacttcgagatcatgttgatcgaaatgtcgcggccctcgcagatctgcacgagctccgccagcgcggaggaggagatgctgttgccggtgaaatagatgtccggcgtatccttcttcagcgcgttgtagttttcgcttttcaaaaactcgatcgccgcgcgggcgccgaggtacgagccgccgatgccgatgacgatgaaaacctctgtattcttcttgatgcgctcggccgccgccttgatgcgcgcgaactcttccttgtcataatcggtcgggagcgtcacccagccgagaaaatcattgccgggaccctcgccggattccagcagcttgtgcgcactttccacctgcggtgcgatcgcttcatattcgtgctcctgaacaaagcccttcaaatacccgcattccaattttaacgacatttttactgcctcctgcctgtttacttttaacaaacggaattgtcgaacacttttgatgttttcattctacaatattttgtggcacttttcaagacttgaatactcggtttcacaaaaagtttgattttagcccggcgcgcccggcgccgcggcgcggaaaaaccagctcaataaatactgaaatgctgagccgaacgtgatcgcttcggcactttccgccgccgtgatcgggatctcctgcacggtctccccgccgcgcaggacacggactgtaccgacaggctgccccttttccaccggcgcggcgacggcctcgggcagctcgatcacggtttcgagcgccccctgctccgaaaccggggtcagcacgcccgcgggcgccgcggcctcgaggcggacctcgcccgtcatgccgccggtcaccggcagcgcgggcagcgcaggcgcttcgggcgacgtgatcttccagttcgcaaagccgtagtcgagcaggctcgccgccgcggaaaaccggtcgttcgtgttggccgcgccgagcaccacgccgatcagcgtcatgccgtttcgctcggccgcggccgaaatgcagctgcccgccgcgctggtcgtgccggttttaaggcccttgatgccgttgtaggagcggacgagcttgttcgtgttgacgagctgtgtctccccgccgcgcacgtagtcgatccagatcagcgtgtaatcgaagatcttttcgtgctgcatcaaagcgcggctcatcacggccacatcgtaggcgctcgtgacgtggccatcctcgtcgaggccgttgcagtttttaaacacggtctccgccatgccgagctccgccgcgcgcgcgttcatccgctcgacgaacgcctcctccgtgccggcaaccgcctcggccagcacgaccgccgcatcgttggcactcatcacgacgcaggccttgatgaggtcgtccaccgtcatctgctcgccctccttgagccagatgtccgaaccgcccatacccgccgcgtgcgccgaggccgtcagcatgtcgtcgtagtggagcgcgccgctgtcgatcgcctcgaacacgagcagcagcgtcatcaccttcgtgatcgaagcgcacggccgtacctcatgcgggttcttctcaaagagcacctcgccggtggaaaactccatcagcaccgccgccggcgcgggcacgtcgagcccttccgcggccgcgggcggcgcaagcggaaccgcgagcgcgcagaacagcgcggcggcaagcagcaggcacagcgccctttttttctttcccgtttgaatgcgcataaccagaaccgtcctttcctcgggcgcctatttccgcaggaacgccccttacacaagcatatgcgcaggcggcgccggttcataccgtgattttcggggttgacagtatttagaactttagctataatcgaaatatcaaatgatctgaggaggtgattcctgccgtgaacgacgacttttttcaggcgctcgccagcccgtaccggcgcgagatcatccgccttttgaagtggaagacgctgaatgccggcgagattgccgcccggttcgacatctcgcagccctccgtctcgcgccacctcgacattttaaagcgcgcgggcatcgtgaccgccgagcggcgcgccaaccagattttttacgcgctgaacctctccgtcctgcaggaattcttgctcgaggcggccgtgctgttcggcccgaaggaggagcccgccgatgaaaaaagctgacccgcgcgccttgattccggcgctttcggcgctcgcgctcatctgcgcagtgctgatcccgtggccgccgctcgccgttctgctgccggccgcctgcctgctcgcggcggttatctgcctgtaccggaaccttggcgcgctttccggccttgcggacgaccacccgaaggtctccacgctgcgcgccgtcacccttttcaacctcgcgctcctcattttctgcgctgtgctagccgcgctgctcgccgccggcgtactccgaatttcggagaacgacgagaaatacctcgccgcggcggtcgtctcggccgtcatcctgtttctcggcaacctcgcgccgaagctgccccgcacgcgccacaccggcctgcgcctgccgtggaccgtcgcggacgaggacgcttggatctgcgcgcaccgcgccgtcgggtatatctcgttcccgctcgtctgcttttacgccgccggcgttctggcgaccggacaaatcgagacgctgacgggcctcgccatactgctgtgggtcggcgtccccggcgcgctctcctaccgcgtgtaccggcagaaattcccgaaaaaataggccgcgcccgagggcgcggcaaataaaccacaaaaggaggcgggcacatggcagacggcattctggtctgcggcctgaacggcagcggaaaaaccacgctcggcaaagcgctggcggcgaagctcggctttcatttcatcgacagcgaagcgctgttctttccggcaggtcccgactacagcgcgccgtgcagccgcgcggaggcggcggagcgcctgctcgcggagatccgcgctcacagcgatttcatcctcgccgacgtgcggggcgattacggtgcggaggccgccgcattttaccgctgcgccgtgcggctcgatgtcccgcgggaaattcggatgcagcgcattcgggcgcgcgctctcgaaaaattcgggcggcgcatgctgccgggcggcgacctgtacgcgcgtgaaaaagcctttctggacatggcggccgctcggacggagcgcgacctcgacgtgtggctgcaagccctgcgctgccctatcctgcgcgcagacggcaccctgcccatcgggcagaacgcggcacaccttgcacagacgctgcgggatatgcccgccctgcgctgagcgcccgcaggatgcacgggcgtgaaaaggcgcctgcattccgcctcgccgtttcacaggatgctttccacggacgcctccgctttcatttccgcgcgccccagcgcggcagagcggcaaaaagcgccggtcccctcgcaaaaagggatcggcgcttcatttcagcctctgcgcacggaaatgccgttttcggccagataatccttgagctgggggatcataatctccctaaaatggaacagagacgccgcgagcaccgcgtcggccctgccgaccgtaaacgcatcgcggaagtgctcgagacggcccgcgccgcccgaggcgatcaccggtatgccgaccgattccgaaacgacgcgcgtcagctcgagatcgtagccggcctttgtgccgtcgcagtccatgctcgtcaggaggatttcccccgcgccgagctgctccgcctttttcgcccacatcaccgcatcgacgcccgtgtcgatgcgcccgccgttcaggtacagcgtccagccgccgcccgggcggcgcttcgcatccatcgcgacaacgacacactggctgccgaatttatacgcggcctcctcgatgatctgcggatttttcagcgccgccgagttgaccgcaaccttgtccgcgccggcgcgcagaatcgcggtgaaatcctccactgtgcggatgccgccgccgaccgtgaacgggataaagatgctgtttgcaacgcgcgacacgatgtccgtcataatgccgcgcgcgtccgaggaagccgtgatgtcgagcagcacgagttcgtccgcattctggcggtcgtactcgaccgcggcctcaacggggtcgcccgcgtcacgcaggttgacgaaattcgtccccttgacgacccggccgtttttcaggtcaaggcagggaataatccgcttcgcatacatcagcctcgtcccccttcccctgccattgcggcaaaattccgcagcagctcgatgccgaccgccccactcttttcggggtggaactggcaagcgagcagattgctcttctgcaccgccgcgtcgatcgtcacgccgtattccgccgtcgcggtaacgacgtcctcctccgccctgaggtaataggagtggacgaagtagacgtacggctccgccgggatgcgtgcaaacaggccgcgcggtctgcggatatcgagggaattccagcccatatgcgggattttcagcccctcgcccgcgggaatccggacgatcttgccgcgcagcaggctgagccccgcaacgcccggcgattcctcgctgctttcaaacaaaacctgcaggccgaggcagatgccgagaaacggcctgcccgaagcgacaaaggcgcggatcggctcctccagcccgcgcgcgcgcagcgcctgcatcgcatcgccgaatgagccgacgccgggcagcacggcggcatctgccgcaagcagcacctgcgggtcgcgcgtgaccgtcaccttgcagccgatgtgaatcagcgctttttctacactgcggatattgcccgcgccgtaatcaatgacagcgatcatcggagcgcaccccctcttaatttagcacactaatataatagctgatattgatatatttgtcaaatcttttctttagcgatcaaaagcattttcgcgcatagcccgctcaggccgagcgcgcccataccgcctgcacgccggagtccacatgcaggtgcgcgggggctgcgccgcgttttattccgcgttgtcccaatttcggctgcgctccaccgccttgtgccagcgccgcagcgctgcggcctcctcgcccggctcgatctgcggcgcatacgcgtgcccgagcttccagatcgtcgaaagctcctcgagcgaatcccacacgccgactgcaagcccggccagcatggcggagccaagcgccgtcgtctcgaggcacacgggctgccgcacggcgcagtgcaggatatccgcctgatactgcatcaggaaacggctgcgggaggcgccgccgtccacgcgcagctcggaaatctgcacgccgctgccggcctccattgcccggaacaggtcgaggctctcatatgcgatgctctcgagcaccgcgcggcacagatgcgccttcgaggtgccgcgggtcacgccgagcagcgcaccgcgcgcgtacatgtcccagtacggcgcgccgagacccgtaaacgccgggacgaacaccgcgccgcccgcatcgggcaccgtttcggcgaggcggtccgcctcctgcggcgattcgatcagaccgagctcgtcgcgcagccatttgatcgccgagcccgcgttgaaggcgctgccctcgagcgcgtaggcgaccgcgccgccgatctgccagccgatcgtcgtaatcagcccctgatcggaaaacaccggcttttcgcctgtgttcatcaggacgaagcagcccgtgccgtacgtgtttttcgccatgccgcgccggaagcagcactggccgaaaagcgccgcgtgctggtcgcccgcgatgcccgcgatcgggatctcccgcccgaaaacggacggcgcgcacatgccgacgacacccgaggacgggacgaccttcggcagcgcgtcgcgcgggacgccgagcacctcgagcattttttcgtcccagtcgagcttttggatgtcgaagagcatcgtgcgcgacgcattcgagacatcggtcacaaagctcctgccctcggtgagcgaaaagatcagccacgcatcgaccgtgccgaggcgcagccgcccctgccgggcaagctcccgcgcgcggggcacgttgtcgagaatccatttcattttcgtgccggaaaaatacgggtcgatgagcaggcccgtcgtcctgtggatgtagtcctccagcccctgcgccttcagccattcgcactccggcgcggtgcggcggcactgccagacgatcgcgttgcagaccgggatgccggtttcggcgtcccacgcgacggtcgtctcgcgctggttcgtgatgctgattgccgcgatgtcctcggcggtgatgcccgcctcgtgcacggcctgccgcatcgcatagagctgcgtctgcaaaatctccaccgcgtcgtgctccacatagccgggcttcgggtagatctgcgtgaattcgcgctgccccatgccggccacgccgccaagcgcgtcgaaaagcacggcgcgcgaactggtcgtgccctgatcaagcgaaagaatgtatctgccgattttcattttgccccaactccctgtctcccaaaattccggccggcggctttaccaccggaaccagttcaggcgcttctcctttttgtcctcctgctcccgcgtgtttcggatgatcttataccgcacgacccatttcgggtcgatgtattccagaatcgcctgcggcacgcggtatttgtacagcgggcgctggtttttcagatcggcgatcaggcgctggtgcaccgccgaattcgcgtcctccgagccgaaaataatcgtccggtaatccttctggctcgtgtatttgaaattgctcataaaatcgacccacacgctgtattccgtgagccgcacgtactccttcggcacgttgagccggatgcgcaccgcgccggaaacgcggccgcctgtgttctgcttgcgcccgtgcacgacgccgaaaatcgggcattcgcagtgcaggccgagcatatcgatcagcgcggcgtactcccctttgaaggagatgctcggcttcgcccagtagacctctccgcgctgcaggatccgcatgaccgcgcccgactgatacgtatctataatcatgtgtgatcttccctttcctcaattcccgttttaacaggcgtgttgtactgtctgcctcactgcaccgcccactcgtagaggaagcggtcgaactgcccgaggtcgttcggctggatcagatactgcttcaaaagctccttttcgttcggcaccgtgcgcctgtaatacgcctccgcaaggccgcccgcgatgcaggcgaccgtatccgtatcgcatttcacgctgaacacattgcggatgcagctctcccagtcctcgctttctaaaaagcagcggaaagcgagcggcatcgtgcccgccgccgtcgcgtcgaacttcgccttcggccggtaggcccaaaggggcttgtgcaccgggtattcaaactccttgtggaagtatttcgcaagcgccttcttgcgctcgccctgcagcgccatgtagataagccccgccgtgaccaccgccgccttgatgccctcgatgtggttgtgcgtgcacatcgcgcttttctttgcctcctcctcgacctgctccagcgtcttgaagtggtacgcgatgtagctcacgcgcatcgccgcgccgttgccgtagctgccgtagccggtttcgctgtggccgtccagccatctctgaaagagcgtgccgtagccgacgcggcggtacatccgcccgagcttgccgtacgccttcgcatacggcatgtcgttcaaaagcgcgtattttgtcgcgatcgtcatcacggtgtcgtccgtataggcgcagccgctgccgaaaaggctgaccgttttatagtcgaagccggagggcttgctgaattcaaaccgcgagccggctatgtctcctaaaattgcaccgttcatcccaaagctcccttgcgattatggtgcccttattatagcatagatttttgcgaatttccatatgctttttgtgaatatccccgcgcttttgactttttcggcgaaatgcggtatgctataggcaacaacgccagacgccgaaaggatgcacgccccatgataaaagccgcaaagaaagccggcgctttgcttttgagcgccgcccttttgctcgcccccgccggctgccgcgcagacgaggcgcagagcgaaagcgccgccgtctccgccgcgccggaaaacgccgtaagccggccgatttccatcaccttttccgaaaagctgctgcggcagaccggcctcgaccccgccgcgaccgcccgcaaattcggcctcacgaacgtgactgacggcgacgacggcgcctgcaccattttgatgaccgccgaggagcaggccgccgtctgcgccgcgctgcgcgaaagcctcgacgaacagctcctcgccctgccggagagcggcacgtggccctttctcgacggcgccgcgctgagcgccgacggcaccgccgtgacgctgcacagcgacgccgcgcgctacagccccgcccgcgacaacgccgtggcgcaggccgtgtacatcccggcgctgctctgcgccgttttcgcgggcgatgacgccgacacctttgccctgcacttcaccgtgctcgacagcgacggcagaaccgtgctcggcgaatttgattatcccgagcagcaggcaagccccagcccggatgccgccgaaagcgccgcgcccgaagcagacggcgaataacgcgcaagccggcaattctcccccgaaaaagcgcaaaggctgcgcggcctcaacgggcctgcgcagtcttttccttttgtttcagttcccgccagatcgtgcagagcatcgtgataaagcacgcgccgccgccgaggaaattcgagatcgcctccgccaaaaagacgccgtgcacgccgacgccggggatctgcggcagaatcagcgtcagcgggatcacgatgacgaccttgcgcagcagcgagaagaagatcgcctgcttcgagcgcccgagcgcctgcgccgcggcctgccccgccatttgcagcgacatcataaagcagccgaaaaagtagatgaacatcgaatccgcacacgcttcgacgagcgtcgggtcgtcgttgaagatgccgatgaaaaaccgcggaaacagcatcagcagcagccacacgacggtcatataaccgacgcagacgaggctcacgaagcggatcgctgtgcgcacgcgccggtacgcctgcgcgccgtagttgaagcccatcaccgggttcgccgcgttcgtgatgccgctgaccggcgcatacgtcacctcgcggatcgaattgatgacggtcatcacgccgacgaaaagatcgccgccgaactgcgcgagcatcgcgttgcacaccacctgcaccgcgctcgtcgtgaagctcatgatgaagcccgccgcaccgagcgagacgatctcccacacgagacgcagccgcaggcgcatgcgccgcagctcaagccggtaaagcgtctttttgccggtgagaaagccgatgacccacagcgccgacgcaagctgcgagagcaccgtcgcgagcgccgcgccgcgcacgcccatgtcaaaggtaaagatgaagagcgggtcgagcgcgatgttcagcaccgcgccgatcagcaccgtgagcatgcccttgttcgcgaagccctgcgcgttgatgaagccgttcatgccgagggagatcatcacgaacacgctgccgagcatgtagattgtgatgtagccgtccgcatacggatacgtcgcgtcgctcgcgccgaacaaatagagaaacggccttttcacgagcagcacgagcaccgtgagcacgacgccggtcaccgtgagcagcagaaaggtgctgttcagcacgtctgccgcgcgctcgcgctggcgctcccccgcttcgcgctgcgccgcgccgcgcgccatcgagaacagcggcgtaccgcccgtgccgaacaaattcgcaaatgccgtgacgatcagaaggatcgggaacgtcagcccgacgccggtcagcgcatcgacggagccctcccccatatggccgatgtacatgcggtcgacgacgttgtacaggacgttgacgagctgcgccagcaccatcggcatggcgagccgcagaatattgcccgaaaccctgccttttgaaaaatcgctgaccgcctgcatgacgccatccccctcgaatctgtttatgcctttcagtatacgcctttttgaagggtttgtaaaggcgtccccggcgctttccgcacggcacagcggccgccgcggtctgcgccgaaacgcaggggcccggttcagcgcgcagccgaaccgggtcccaaaattatatcgcttttgcgccgcgctttttttcttggaggatactcccccacgcgcgccgcccttttccgcgcggatacacccgtgcgccggcttcaggctcaaagcccctgcacggaagcctccatcaccttttcgccgttgatatcgagccggccgttgaaggcaaagccgaattccgcgtacaggcgcgccgccacgcggttgctctcgtacacgctgaggtacagcgtatcgcagccgtattcccgccgtattctgcgcatcagcgcgggcaggaaccgcttggaaagcccgcggccctgatagcgcgcgtcgatgaagaagcggtcgagccacacgtccgcgccgccgctttcccgcggccaagcgccgtacatcgcgaagccgacccacacgccgtccgccgcgagcaccacagggcgccatagcggaaattcgagcgcctccgcccagcattcggcgaccgtctccaccatgcccgcctgcgccggcgcgacggcgagccgctccgcctcggcgacattctcctttgtaaccggtataaagccgatttccataaataaactctcccgaatcgttgaaacgcggtgcggtcaaatgtgcagctcgatctcagccgggcgcgtgccggtcagcgcgcagctatgcgcgtcgggctgcgaaacgccgacaaacagcgtgaagctgcggctgtccacgcggcgctcaccgcggtcgtcaacgatctccagcgccgcatccggcacgaagatctcggcctgcttcatctccgccccggagaacgcgacaggcttaaagccgcagaggctgtaattgcgcacggcgaatttcgattcattgtcgcggatgtagacctcgacgacgtcgccgcccgcggcgccgctgtgctcgagcgaagccgtcacgcgccagccgccctctgttttttccgccgacgccgccgtcacggcggttttgccgtaggtcaggccgaagccgaacgggtagagcacatcgcccgcaaagtagcggtaggtgcggttctccatcgcgtaatcggtgaatgcgggcaggtcgtccgccgaattgtagaacgtgacgggcagcttgccgctcggcgaatactcgccgaaaagcagctccgcgatcgccttgccgccgcgcgcgcccgggtaccagccctgcacgaccgccgaaaagtgcgcgtccgcaaagcgcagatccatcgcgctgccggtcatgttgacgaggatcaccggcttgcccgtctctgcaaccgcctccatcagcctgcgctgcggcgcgggcaggagcaggtcggccttatcgccggagccgcccgcgttgctttcgtgcatctcctcgccctcgaggttttcgttcaggccgacgacgagcacaacaacatcgctgtgctccgcaaccgtctgcgcctccgcgaggcggtcgccgggctgcgcgagcccttccgcacggtcgcggtacaggtggcagccctcggcgtacagcacgcgcgcccggtcgcctacgtagtcctgaatgccctcgagcaccgtgatgtagcgggaggccgtgccgtggtagttgccgatcagcgccatgcggtcgttcgcgttcgggccgatcacgccgatcgtcttgatctcaccgaggttcagcggcagcaggccgtcatttttgagcagcacaacgctgcggcgcgccgcctcctcgctgagcgcgaggtgctcggggcactcgaccgtttcatacgggatcgtgttgtacacgcagttttcgtcgaactcgccgagcaggaagcgcgtcgtaaacagccgctccgcggaggccgtgatgtcctcctccgtgatgagccccgcctcgagcgcctgcagaaggtgcagataagtgttgccgcagttcacgtcgcagcccattttgagcgcgagcgcggcggattccggcgccgtcgccgtgatgtggtggtgcaggtggaagtcggagatcgcccagcagtccgaaacatagtgtccctcaaagccccacttgccgcgcaggattttgcgcatcagaaggtcgctgccgcagcacggctcgccgagcgtgcggttgtatgcgcccatgacggactcgacctcgccctccttgaccgcggcctcaaatgcgggcaggtacgtttcccagaggtccttctcgctgaccaccgcgtcgaactcgtggcggatcgcctccggcccgctgtgcacggcgaagtgcttcgcgcaggccgccaccttcatgtactcgccgtcgccctgcaggcccttgatgtacgagacgccgaggcgcgccgtgaggtacgggtcctcgctgtacgtctcctgcccgcggccccagcgcggatcgcggaacaggttgatgttcggcgaccaaaaggtcagccccttgtagatgtcgcggtcgccgtgcttcacggcctcgttgtacttggcgcgcgcctcggtcgccacgacgtcgccgatcttctgcatcacggcctcgtcgaacatcgaagccatcgcgaccggctgcgggaacatcgtcgccgtgccggcgcgcgcgacgccgtgcagcgcctcgttccaccagttgtaggccggcacgccgaggcgctcgatcgccggcgcgtcgtacttgagctgcgacgccttttcctccaccgtcatctgcgccacaagcgccttggccttcgcctgtgcctctttcctgtctcgcattgtgttttcctccaaatcattcgaattgcattgccgttgccgcacacggcatttgataaaattatagcacgattttgagcggaaaacaaagtcaaaaccgtgctattttatgccaaatcttgcgctttcaatgttctaaagccgttcacgcattttcgaggaagcccgcccgcagcatcgactgcgccgcaagaatcgcgccgaggcggccgctgtcgaagttgacgccgccctgcatccacgcggcgtacggctcgcgcagcggcgcgtccgccgaaagctcgatcgaggagccgagcgtgaacgacccggatgccatgatgacctcgctgtcgtagccgggcatcgggctcggctcgggcacgacgaacgaatcgaccggcgcgccctgctggatgccgcgcacaaaggcgcacagcgcctcgcgctcacgcagcttcacggcctgaataatgtcagcgcgcggctcgtcgtagcgcggcgtgacctcatagccgaagcgctcgaagagcgccgccgtgaacaccgcggtcttgagcgcctcgcccgtaacgttcggcgcgtggaatgtgcccatgaacagctcgcggttgttgccgagcgtgcagccgatctcgcggcccgtgcccggcgtcgtcaggcggtacgcgcacatctcgacgaggtcgcggcgcccggcgatgtagccgccggtgggcgcgatgccgccgcccggattcttgatcagcgagccggccatcaggtcggcgccgacggccgtcggctcaatcttctgcacatactcgccgtagcagttgtcgaccatcacgatgcagccgggcgcgcggcgcttcgcgatctccgcgatgcggccgatctcctcgaccgaaagcgacgggcgcaggctgtacccgcgcgagcgctggatatacaccatgcggcagcgcggcgtaaccgccgtttccatcgccgcatagtcgggcgtgccgtcgggcagaagatcgacctgctcgtaatttacgccgaattccttcagagagccgcagctctcgcccgaaaggccgatgacgccctgcagcgtgtcgtacggcatgccggtgacggagagcatcgtgtcgcccgggcgcagcacgccgaacagcgcaacggtcagcgtgtgcgtgccgctgacgaaattgtagcggcagagcgcgtcctccgcgccgagcgcataggcatacaccgcgtcgagcacgtcgcgcccgcggtcgccgtagccgtagccggtcgtcgcgacaaagtggctctcgctcacgcccgcctgcatgaacgccgcctgcatcttctcctgattgtaccgctgcaccgccgcgattttcgcgagatacggcgcggcctcctgctccgccgcctccgccgcccggaggatgcggtcgtctatcttaaaaaactcatacatactgttttcctccgcccccgcgctgcaggggcaccctttccttgcggtccggcccggcacagcgccgcgtagttcccgcaatcatcatttcctttattccaaaacgcccgcgcaccacgcaccgctctgcacatagccgcggcgggcgtaaaaccgttcgttttcgtgctccgcgcgcagcagatacacgcggcagccgccgagctgcgcctcaaccgcccggagcaccgcgccgccgtaccctttgccctgttctgccggcaggacggccaccgcggtgaccagcgcgctttcgccggccaaggctgccgccgcagccgccaccgcctcgccgcccgcatacagcaccgaggcccgcgccgcgccgtggcgcagccggtgcgagagatcgagataaaacggctcgaaatcgccggccatgccgtttgcggcgagcacttcgtacaccgcgcgcaccggggcaggctccgcgggggcaggcgcgcccgcaaggtctttttcgagcaccgcgccgcgcgccgcagcccgcaggccgagccgcgcgccgttttccgcgctgcacacgacctgcgccgcgccgaccgcgccgagaaacgaccgcgcttcctcggggtcctccaccgcgcccgcgatgcgcatcacgccgtcgagcatgccgtaggccgccgcgccgtccgtccaaaactgcgcgaacgggcggctgaggccgtaggccaaagcggatgagaggatttggcagccgaacgccgaaccgcacagcgggcgcagcgcatcgatcgtctccgcgaggcggatcattcggtacgtccgcccgcgatttccgccatgagccgcgcggtcagccggatcgtgttctcgatgtcggcctcgcttgccatcgccgccgggccgtggatgtaccggcagggcaccgcgagcgtgaccgtctgcacaccggccttcgtcacatggatgctgcccgcgtcgttgccgccggcgctcgccgttttcggctggcaggggatcgaatgctcccgcccgagtgcgagcgcgcgccggaaaaatgtgcgcgaaaagatcgtgcgcttatccatgaaggacaccgcggggccgccgccgagcttgcagaccgcgtcaagcggctccgcgccggccacatcacccgccgtcgtgccctcgagcacgatcgcggcgtccggctccacaacaaaggccgccgtgcccgcgccgcgcatgccgatctcctcctgcacggaaaagacgaaatacgtgtcaaattcgagcgccgtgcgcatcagctcgatcagcacgaagcagccggcgcggtcatcgagcgccttggccttgaccgtgccgcgcgacgcttcgaaaaacggcaggaacgagacgttatcgccgatctgcacggcggcttcggcctcctcgcggctcgacgcgccgatgtcaatcgagagctggtcgaccggcaccggccgcgtgcgctcctccgccttcaagaggtggatcggctttgcgcagatcacgccgggcaccgtgccgttcacgcacaccgcgcggccggaaagcaccgccggacgcacgccgccgaccgtgtcgaatttcaaaaagccctcggccgtgatgttcgtgacgacgaggccgacctcgtccatatgcgcgcagagcatcagctttttcacagggcgcttttcgccctttttaaaggcgatgatgttgccgagcggcgtgatttccacgctgtccgcgagcggttcgatctcttcgaggatcagcgcgcgcaccgcgtcctcctcgccggaaatccccactgccatgcagagcttctccaaaagttctatatttttcatcgcttattcctccgccccgtctgtgatgtacgccgcgatcagccgcgcggtgttttccatatccgcaaggtcgcagacctcggcgggcgtgtgcatgttgcgctgcggcaccgagatcagccccgtgcgaacgccggcgcgcgagacgccgatcgcatcgcagttcgtgccggtgcggccgcccatcgcctccggctggtatggaatgccgtgcttttcggcgagcgccgcaagccgcttgctgattttgcggtcgagcgcggcggagaagccgaccatcgggccgccgccgagctttcccggcagctccgaagcaccgggctgcgccgcgaacgaaacgtccaccgcgatggcctcggtcggctcgagcgcgtaggtgcgcacctgcgcgccctgcccgccgacctcctcgcgcgcggagcagagcaccagcacgcagcagccggagagcttgtcccgcacgagctgcgcggcccgaatgatgcaggcgcagccggcgcggtcgtcgagcgccgtgccggaaatgcggctgccgagcagccttttcagcggatttgtcagcaccgcgcggtcgccgacggagacgagcgcctccgcctcctcgcggctgaggccgacgtcgacggcctgctcggaaaccggcgggatattttcgccgtcacccttggcaaggtgcgggggtagcgtgcagacgatgccggtcagcgtctccctgccgtacacggtcacggtgctgccgggcatcgtgcggcagtccacgccgccgacgttcgtcacgcgcagaaagccgttttcatcgatattcgtcacgaccagaccgatctggtcgatgtgcgcgtcgagcagaatgcgccgttttgcgtttctgtcgccgagcacgccggtcacgccgccgagcgcgtccacctccaccgcatcacagaacgaaagcgcctgtgccgccgcgcggtacgcctcctcctcacagcccggcgtgccgtgcgcggcgcacagcgcgcgggtcagccgttcgatttcctcatacatttcgcttcacccggcctccgccctgcggaagccttccctttcctattaagatttcggcgcagccgccggcaaaacaaaagccccgcattccggcgagccgaggcccacccaaagcgaggcgtatttccgcaaatattattttgtgaaatacatgatgatgttgatcgcaatgaccagtgcgaaaaagcccagcgctataaacttcgtccagcgggagaggaacgcatccaccgagcgggatttgttcttcgagaggaacgtatccgcaccgcccataaccgcgccgacattctgctggtggccctcctgcagaagaacaacgagaatgatcgcgatcgagaacagaagcagaatgatgccgaaaataatttcaactacacccatgatttaacctccttctgcaagagcggcgccgcgcgggcctttgaaaaatccccgccgcaccgcataaaatacttttatgctgatagctttcctatcatagcacaaagcccgcaaatttgcaaccacattttttagaattttcctgaataagcgcccgcccgccggccataatacgagtacggcaaacacagtcacgcgtttgtgcgtcccggatcaaagcgagcggccgcctcaaagggcggcaaaaggcaaagactcggtacggactgtatgttgcctgcccttcgacagaacataattccaacacgttttcatatggagtgcgcatatttgctttttccgagctctcggaattgccgatcggttcgacggccggcgttgcggatatgccggccgggaacccctcgccctccgccgttcatccgccgatgaccgggaaaacatggtggatggacgttttgccggagggctgattttttgcccgcagcgcggttgacagagccggcggcctcaggtataatggataaaaatcgcagcggaggcgaaaaccatgtatcgaaaaatcggcattctctgcgccggagacagcgagcttgcgccgtttctgccgcaccttgaacatgcgcggacaagcgaaaaggcgctgctgaagttttacgagggaacgctctgcggcctgcccgccgttttgctgtacagcggcgtgtgcaaggtcaacgcggcgatcgccgcccaactcctcattgatgtctgccgcgcagacgccatcatcaatgcaggaacagccggcggtatggatccggcgctcaaaatctttgaaaccgccgtttccaccgaaacggcctatcacgatgttgccgaggatatcctgacagattttcacccgtggatgaaatccgtctggttcccggcagacactgctctgctcacgctcgccaaagcggcggccgagaagcgtccgccggaataccccgtacatttcggccgcatggtgaccggcgaggcgttcatcacagacgagggacggcagtcgattaacgcgcgttttgcgccgctcaccgtggatatggagacggcggccgtcgcgcatgtctgccatgtgaacggcgtaccgtttctcgcgatccgcacagtcaccgacacggccgaccacagcggcaccgggaatttcgagctgaactgtgaaaaggcctcggccatcgcaaaggattttacgctcgcgctgctcgaggaaatgaaagcgcgcgcatgaacgaaagcgcccctacggcattcccggcggcagccggagaagaaccgcaggggctttttgcgttggaagcagccggcgtgcccggccgttttcagattgtcggcatcacgcgcccgcccgaaaccgagaggaacgcgccggtgatgtagtccgaaaggccgctcgcgaaaaacagcaccgcgtccgcgatgtcggcgtcgcagccgcgccgccccatcggcacgctgtccacatacgcgccgctcgtgacggcgcccgccgcgcgctcgcgctccgtgatcatccagccgggcgcaacctgattcaccgtgacgccgcggctgccgacctccttcgcaaacgagcggcagaggccgtccagcccgcgctttgccgaggagtacgccgccgcgccggggtcgcaccgcatcgcgcattcggtgttgatcacgatgaacttgcccgcgccgcgctccagcatcgccggcgcaaacgccttgaacatgtaggcgttgtgcatcacggtcgaggcgaactggctgtagaaatcctgcgggtcctgctccatcacgtccttccatgcgtactggatcaccgcgttgttcacaacgatatccgggctgccgaagcgcgcggcctcatcgcgcatgcgcagcacactctcaaaatcggtgacgtcggcctgcaccgccgcggcgcgcgtccccgcggcctcaagctcgcggacgagcgcctcggccttttccccgttttggttgtagtgcacgagtacggcggcgcccgcctgcgcgaggcggcggaccatcacgcggccaagctggcccgaaccgcccgtgacaagcgcggttttcccgctcaaatcgattgaaaccatacggctttcctcctcttgcttttctgccgcccgagcgcgtcgcccgggcggcagatttttcatccttctaactgctttcggcacagcgcgccgaaggccggcgcctgcatccgcccgagccttcccggctttaagccgcgccgcttacagcgacgtctgcgcgtcgcgcccttcctcgccgttcggcagcgcgccgagcgccggcagcttctttttgaagcgcgccggattctggaggtcgccctcctgatacacgacggccgacagaacgcgctggcccttcttgagcgtcatcgccgcgacgccctgcgtgcttttcgtcgccttcggcgcgatcagccccgtattaaagagcagcatgcgcccgctcgaggccgtcagcagcacgtcgccgtcctcgggaagctgcagcgctgcgaccagcggagatttatccgaatacgcgtttaagagcttgcggcggttcgtcttggtgctgtaggccgaaagctccaccttcgcggccttgccgttttcaaagacaaacagcatgaagccgctgtaatccgaagtgaccgccatcgcggccgccgtctcgccctcgtccatctgcacgcgcgcggggatgtactcgcccatcacgctcgccttcatatcggcaaaatcggcagcgcgcgtcttgtagacctgcgcccggtcggagaaaaacagcagctcggcggcgttcgtcgattcgagctggcgcacgatcgcgtcgccctccttgagcttctgctcgccgcccatgcgcagcgagagcggcgtaatctttttgaaatagccctcgcgcgtgaagaacaaattcaccgggtaatcggggatctcctccaccggctcctcctcgcggatctcgtcggcgtagaggatcaggctgcggcgcggctggccgtacttctgcgcgatctccgaaagctcgcgcgtgataatcgtcttgatgcgcgatttcgacgcgagcactgcctcgagatcgcggatctccgcctcgaggttttcgatctcctcggtgcgcttcaaaataaactcgcggttcaaatggcgcagcttgatttccgcgacgtactcggcctgcaccgcgtcgatgccgaagccgatcatcaggttcggcacaacctcgctctcctccgccgtctcgcggacgatgcggatcgccttgtcgatgtcgagcagaatcgcccgcaggccgtagagcaggtgcagcttctccttctttttcgtaaggtcgaaatacgtgcggcggcggacgcattcgacgcggaacgccgtccactcctcaaagagagcgcgcacgccgagcacgcgcggcacgccggcgatcagcacgttgaagttgcaggcaaagctgtcctcgagcgaggtcatcttgaacaggcgctgcatcagcttttccgggtcggtgccgcgcttgagatcgatcgtgatcttcaggccgtcgaggcccgtttcgtcacggatgtcggtcagctccttgagcttgccctgcttgacgagatcgatcaccttctcaacgatcgcctcgatcgtcgtcgtgggcgggatctgcgtgatatcgatgcagttcgccgccttgtcgaatgtgtagcgcgcgcgcacgcggatgctgccgcggcccgtctcatagatctgctccatcgccttgcggtcgaaaataatctggccgccgcccgggaaatcaggcgcctgcatcgtcgtgaaaagatcgtgcttcgggtttttcatcagctcgatcgccgtgttgcagacctccgcaaggttgaacgggcagatcgacgacgccatgccgaccgcgatgccggtgttcgcgttgacgagcaccgagggaaacgccgcgggcagcagcgtcggctccttcgtcgtgctgtcgtagttgtcgataaaatcgacggtatccttgtcaatgtcgcggaacagctcgcggcagatgccgtcgagccgcgcctcggtgtagcgcgaggcggcccacgccatatcgcgcgaatagaacttgccgaaattgcccttcgaatcgacgtacgggtgcagaagcgcctcatagccgcgcgagaggcgcaccatcgtgtcgtagatggcggcgtcgccgtgcgggttcagcttcatcgtctggccgacgatgttcgcgctcttcgtgcgcgccgaaccgagcaggttcatcttatacatcgtgtagagcagcttgcggtgcgagggcttgaagccgtcgatctccgggatcgcgcgcgacagaatgacgctcatcgcatacggcatgaaattcttgcggatcgtatcgttgatatcctgctcgacgatctcgcccgcacccgcgataaagccctgcattttcaccgcgctctcgcgctttggctgctgttttttcctcgccatatcctctctcctttgctttcacaggccgcggtgcgcaaaccgtcacgaaacatccagatcgtccatatactcgctgccgtgctcggcgatataatccttgcggccggcgaggttgtcgccgagcagcgtgtcgaacatctcggccgtacgctccacgtcgccgggcttcacctgaatcaggcggcgcgttttggggttcatcgtcgtcaggttcatcatctcagggtcgttttcaccgagacccttcgagcgctgaatcgtgtatttctggcccttgagctcgccgaggaactgctccttctcgcgctcgtcgtaggcgaaaaacgtcttgtccttcgaggtgatctcatacagcggcgactccgcgatgaacaccttgttctggtcgatcaggtcgggcgtcaggcggtagagcatcgtcagcagcatcgtgcggatatgaaagccgtccacatccgcatcggtgcacaggatgatcttgctccagcgcaggttgtccatgtcgaaggtcgcgaggttcttgttcgccttcgatttcacctgcacgccgcagccgagcaccttgataagatcggtgatgatctcgcttttgaaaatcttatcgtagtccgccttgaggcagttgaggatcttgccgcggatcggcatgattgcctgatagtttgggtcgcgcgcctgcttgaccgcaccgagcgccgaatcgccctccacgatgaagatctcgcgctccgccgtatccttcgagcggcagtcaacgaatttggcaacgcggcccgtgatatccattttcgcggtcagcttgcccttgaggttcaaccgcgtgcgctcggcgtcctcgcgggagcgcttgttgatgagcacctgcgcgccgatcttctcggcctccatcgggttctcgatgaaatagacctcgaggttgtggcggagcatctccaccatcgcttcctgaatgcccttgttgttgatggccttcttcgtctggttttcgtaggaggtcatcgtcgaaaaggaggacagaacgatgacgaggcagtcctcgatgtcctggaacttaatcttgctctccgacttgttgtacttgccgttctgcttcaaatacgcgtcgatctgatagacaaaggcgttctgcacggccttgtccggcgcgccgccgtactcgagccagctcgagttgtggtagtattcggtcaggtgcaggcggttcgaaaaggcgaccgccgcattgatcttcacgttgtagagaggcagatccccgcggtcgcgcacttttttttcggactgccagaactggatcgaggtcagcgcgtcgtcgccgcagagctcgcgcacgtggtcctcgatgccgttttcgtagcagaacacggtcgtctcgaacttcctcggcgacacctcgtttttgaagatgaatttcacgcccgcgttgacgatcgcctgccggcggatcgtgtccgtgtagtattcggccggcaccgcgatgtcggtgaacaccttgaggtccggcttccagcggatcacggacccggtatccttcttcgcgtacggctccttctgcaggccgccgacgttctcgccgtgctcgaaatgcagcgtgtagcggaagccgtcgtagcggatgtccgcgtccatatattccgaggcatactgcgtggcgcagaggccgaggccgttgaggccgagcgcgtagtcgtagttgccgccgtcgttgttgttgtacttgccgcccgcgtacatctcgcagaaaacaagctcccagttgaagcgctcctcgcgcttgttgtagtcgaccgggatgccgcggccgtggtcctccacctcgatcgactggtcgaggaagcgtgtaacggtgatctccttgccgtagccctgccgcgcctcgtcgatcgagttcgagagaatttcgaagatcgcgtgctcacagccgtcgaggccgtccgagccgaagatgaccgccgggcgcagccgcacgcggtcggcgcccttgaggctcgttatgctttcgttgccgtaattctgttttttcgccatagcgtttcgctcctttcgcaaggaatgtcctgcgccgttttccggctccgccgcacgcactgtacggcggagctgaacgcgccgcgcggaggcccgggccgtctctttcgcccctgccccacacaccgccggccccgttttcgaaccggcggggtataaacaaacgtaaagggaatgcactgcacattccctttcgttcaaggttaatcctgttgttcttccgcgctctccggggcactctccgccgggatggcggccggctctgcggcctgcatgccgctcggaagcagcctgccctcgatcacgtcgataaattcatccgcatcgagcttttccttttcgaaaagcacgccggccagccggtgcaggacgtcgatatggtcggaaagcaccttctcggtcttttgataggcgttgaagataatcgacttcacttcctcgtcgatctccgccgccgtctcttccgagtagttgctcacatggcccatttccttgccgaggaacgggttgctggtgtccgtgccgtaggtgatcggcccgaggcgttcgctcatgccgtatttcgtgaccatcgcgcggacgatcttcgtcgcgcgctcgatgtcgttggaagcaccggtcgagatgtcgtcgagcacgagcgcttcggcgacgcggccgccgagcaaaacgatcagctcctccttcatctcgttgcggctcttatacgatttatcctcggtcggcaggtgcatcgtgtagccgcccgccatgccgcggggaatgatcgagatttgatggaccgggtcctgtgaatcgcagtagtacgtcgcgaccgcatggccggcctcgtgataggccgtgagcttcttttccttgtcgctcatgatacggctctttttctccgtgccgacgacgaccttgatcgtcgcctcctcgatctccgccatcgtgatggcccggcgctccttgcgggctgcaagcagcgccgcttcattgaggaggttttcgaggtccgcgccggtgaagccggccgtcgatttcgcgatcgtctcaaggttcacgtccggcgcgagcggcttgcccttcgcgtgaacgcgcaggatctcctcgcggcccttgacgtccggatagccgaccgtgacctgccggtcgaagcggccggggcgcatcagcgccgggtcgaggatgtcggggcggttcgtcgcggcgatcatgatgacgccctcgttcgcgccgaagccgtccatctcgacgaggagctggttcagcgtctgctcgcgctcgtcgtggccgccgccgaggccggcgccgcgctggcggccgaccgcgtcgatctcatcgataaagatgatgcaggggtggttcttcttcgccttgtcgaacaggtcgcgcacacgcgatgcgccgacgccgacgaacatctcgacgaagtccgagccggaaatcgaaaagaacggcacgcccgcttcgcccgcaaccgcacgcgccagcagtgttttgccggtgcccggagggccgacgagcagcacgcccttcgggatgcgcgcgccgagctcgttgaacttgttcgggcgctttaagaactcgacgatctcgcggagctcttccttttcctcatccgcgcccgcaacgtcggcaaacgtggtgcggcgcttttcatcgccgatctgcttgactttcgccttgccgaaattcatctggttgccggccccaccgccgcccatgcgcttcatcataaagacccagaacacgacgagcaggccgatcatcagaagcgtcggaatcaggctgacaagccagctcgtttccgccgggcgcagcacgtcctgctccatcttgtttttcggatgcgcctcgttgtaggccgcgatgtcgtccgaaacatcgttgtagaacaggttgacattcggcaccgtgtagcgcacgatgctctccttgcccttgtcgtcggtgagcttcagctccatcgcgccggtgccgaggtccagcttatagctggtgacctgaccttcttcaaaatactcgagcacatccgaatacttgagctccgcctgtggggttcggttctgtgtgaacacgaagagcagcacgaaaaagatcagtatcggaacgccgaggtaaatcgcaagatttcgaatgatttttttgttgttattcaagttccgacctcccggaatgtaatgatattatatcataatatttctgcaatctatagagagcaggaccgccgccttacgcgccgtaaacctcgggcttcagcacgccgacgaacggcaggttcctgtatttttcatcgtaatccagaccgtagccgacgataaacgcgtcgggaatcgcacagcctatgtacttcgcgtgcacatcaacctcgcgccgctcgggcttatcgaacagcgtgcagacctcaatgctgttcggctctcggcttttgagcaggtccacaaggtagtgcagcgtcttgccgctgtcgaggatatcctcgacgatgacgatgtcgtatcccttcaaattgatatcgagatccttgatgatcttgacgacgccggaggttttcgtgccggagccgtagctcgaaaccgacatgaaatcaatccgcgccggaacctcgatcgcgcgcatcagatccgccataaacacgacggagcccttgagcacgctgacaagcagcaggttcttgtccgcataatcgcgcgagatctccgcacccacgcgcttgaccatcgcggcgatggtctcctcgctgtagaggacttcctgaatatcgtttaacattgtgtttgccatttgaaccgttcctttctccctcaagtttcaccgcatacctgaatttccagcgcccagccttcctcaaagcaggccgcaaagccctcagccgggccgacgccctcaatccagacgatcgtgccgtccagctcgagcagcagcaccgcgccgcgcgcggccgccggaatccgcagctcgttgaaaagctttttcaccggcttcgtcacgccgcgcccataaggggcgaagcggtcgcccgcacggcgcgtgcggatcaccggaacaccagtaattctatcacagtccaaacggtttttaaataacaaattatgaacattcgggctgttttttccgttttttatgaactttcttgaaacaatcaattttttgccgttcggcagcagtgtttcggcctgtgtcaccggaagtgtaaagccaataggcttcacgtccacgactgtaagcgtatcctgctttacggaaagcaccgcgccgccgggcagcgtcagcccgccgccgcagaggacgcagtccgccgcgcgcagcaggtgctcatagctcattctgcccagcggctgcaaatatatttcaagcgcccgatgcaaaagtgcgggatgcgccgcgcgcagcaccggcagagatagcccgcccgccgtccgcgcggcccgcagcagcgcctcggcctgcgcctgcatgaagtcgttttcgagcgccatgctcgccgtgaaacgggaaaccgcgtccgaaagccgcgggttgatctcgcgcagttccggcagaacgcggcggcgcagccggttgcgcgtgtacgtctcctccgcgttcgtcgagtcctccacccagtcaaggtgaaacactttacacaggaactccacctccgcgcgcgatacgccgagcagcggtctgcgcagcttatcgcgccgccgcgggatgccgccggcgccgcgcggacccatgccgcgcgcaagattcaaaagcagcgtctcggcgttgtcgtcggcgttgtgcgccgtggcgatcgtgtcgctctcccccgcggcggtctccgcaaagcaggcgtaccgcacgcgccgcgcgcattcctcgagcccctcgcggcgctcggccgcaaggcgcgggacgtccctttgaaacaccgtcagccgcaggccgcgcaccgcgcagaaatcgcgcacaaagcgctcgtcccgcccggcctccgcgccgcggatgccatggttcacatgcacggcgtgcagccgcgccgcgccgtattttttcagcagcaggtgcgcgagcagcgtggaatccgcgccgcccgaaaggccgacgacgatcgcgccggtctgcggaaaatcatagcgcacctttcggaggatctcctcagctttcacggcgcacgacctcctgcgaggtaaagcgcatgaactcgccctgccagtgcagcggcacggagcgcaggtcgccgtggcggtttttcgccacgatgcactcagcgctgttcttgtcgacctcctcgggcgatttcgcctcgttcgcgtagtatgcgtcgcggtagagaaacagcacgatgtccgcgtcctgctcgatggagccggaatcgcgcaggtcggagagcaccggacggtgctcctgccgcttctcgccggcacgcgcgagctgtgcgagcgtgacgaccgggatattcagctccttagccatgattttgaggctgcgcgtgatctccgaaatctcctgcacgcggttgtcgatgcgcttcgcgctgttcataagctggagatagtcgatgaaaacggcgtcgacgtcctttagtcggcggatcttcgccttcatctccggcaccgtgataccgggggaatcgtcgagataaagctccgccttcgagaggatgtcccccgcctcgacgaggcgcgtccagtcgctttcggtgagctcgccggtgcgcagcttcgtgccgccgaccatcgcctccgcggagagcacgcgggccgcgagctgctccttcgacatctcgagcgagaaaaaggcgacgcgcttgttgcaggtgatcgagacatgccgcgcgatgttgagcgcaaagctcgtcttgcccatgccggggcgcgcgcccatgatgatgaggtcggagcggttgaggccggtgatcgtgttatcgagctcgcggatgcccgtcgggatgccgcggtacaggtccttgtccggcgaattcagccggtcgagccgctcgaaggtctcgaaaagcacctcgttgagccgctgcaggcccttgatgctcttgccgcgccggatgtcgaagatgcgctgctccgccgaatcgagcagcagcgccgtttcgcccgcgccctcggtcgcgtcgtccaaaatgccgcgcgccgcctgaatcagcatgcgcacgtcgaacttgtcgcgcacgatcatgcagtattcctcgacattcgagatgctcggcacgagctgggcgagctgcatcaggtacaccttgccggagccttcgtcaaatgtatcttcctcacggagccgctcgagcagcgtgacgaggtctaccggcttgcccgccgtgaacatttcgagcatcacaccgtagatcaggcggttgttgacctgatagaaatactcggcgcgcggcaaaagctccgccacggtcgaaagacaggacggctccagcaaaacagcgccgagaacggattgctccgcctccgcgctgaacggcagcaccatgcccggcaccgccgctgtattcagttcaaaagctccgtccgccatgcgtacagcccccttttcgaaatgtgcggcaccgccgcagagccgggcttaaacctcggtcacggcgacggagagctttgcggtgatgcccgcgtagagcttgatctccgccggatagacgccgaacgccttgatgtcgctgctcaaattaatcttgcgcttgtcaatctcgaggccgaactgcttcttgatctcctgcgcgacctccttcgccgtgacggcgccgaacagcttgccgttgagcccggccttcgccgtgatcttgacggacttgccctcgagcgcctcggccgcgcgcttcgcctcatccgtctcggtcttgatcttataggctttcgaggcctcggcgtttttcagctcgttcatcgcctgcgcgttcgcttccttcgcgagctttcgcggcaggaggaaattgcgcgcgtagccgtctgaagcattgatgagctcgccctttttgccgacgcccttgacgtctgccagaagtacaactttcatggtgataaccccttttcctgttttaatatggctttatgcgaaatcagccgtcagttttcaaattttgaggcctgcgccagcttgctgtccagcacgcggaccagcgccttgcgcacgtcgttcgtcgtgctgtttttcacctgcgcgcccgccatcgtcaagtggccgccgccgccgaattcctcgagcagcacctgcacgttcacgtcgccgaggctgcgggccgagatattcgtctcattgcccgcgcggaaaatcacaaacgacgcgcggacgttctggatcgagagcagctcgtcggctgcctgcgccgccgcgatgcggatattcggaaactcccagttcgagcaggcgatcgcgcagcccttgtagacctccgcgcccgcgacaagctgcgagcgctccttgtaggtgtcgagcgaattcgagaacatcttcttgacctccaccgtatcggcaccgcgccgcttcaggtaggccgaggcctcgaaggtgcgcacgccggttttgaggacaaagttcttcgtatcgagcatgatgccggcgagcagcgccgtggcctcgcgcttgttgagcgcggcgccgttgatgtactgcacaagctcggccaccatctcggaggcggagctcgcatacggctcgtggtaaaagatgatcgcattttgaatgtgcgccacaaccatgcggtggtggtcgatcacgacgacgcgcgggatcgcctttaagacctccgggctttcgacaaacgtcatcgaatgcgtatccaccacgatcagaagcgaccgctgcgtgcagaggtcctgcgcctcctgcggcgtgatgaacatatcctcgtactccgcctgatggtcgaacgtgttgatcagactcgtcgcgagggagcggccgcggtcgataacaatactggcgcggcactcgagccccttcgtaaccgccgcccacatgccgaccgccgaaccgacgctgtcgaggtcggaattcgtgtggcccatgatgaacacgcggtcgctcgacttgatgtggtcggaaagcgtggccgcgatgacgcgcgtgcgcaccttgtcgcgcttttccacgcccttcgagaggccgccgaagaactcgtatgtaccgtccggcaggcggacggcaacctgatcgccgccgcggccgagcgccatatcaagcgcgtggcgcgcgtgcagctcgctcttcacggccgttgcggcgccgcggccgatgccgatcgaaaccgtggcggacatattgttttcgcctttaatggcgcgcacgctgtcgagcacggcgaagcgcttggccttcgcctcctccacgtgctggtcgtcggtgatgagcaggtagcgcccgttcgtcaaaaggcgcaggaagccgcccatcgtgtcgttcgcccacgtgcgcagaacggcctccacctcggcggtgatgcgcgattcctcgctgccgtccgcatcgcgcgtgagctcctcgcggttgtcgaacgagatcagcgccacaacggtgcgccggtccctgaattccctgtggatctgcttataataggtatcgtcgacaaagtaaacgacgctgccgccgcccgcgcgcaggccgtaggccgtgaactcgcggtcgccgaaggtgacggcggtgccactctccgaaaggatctggcgcagcgttttcgggtagatataggcggcgatgttgtcgccgcggccgtccgcgtcctcggtaaagagctcgcggaagcgcgcgttcgtccacacgatgtccccgaggttcccgagcaccgccaccggcagcgcaaactggtcgaagtcccgctcctcctcggcggagagcacgcggcgcgcagcgcgcagcgccgtctggatatgcacgcggtagtgcaggtcggtgacaacgaccgcgaccgcggcaagcaccgccgccgtcagctccgccgcgaacaggatcttgttcccgcggaagctcaggcaggccatcacaagcatggcggccgccatggcatagtacaccggcgaggtcgtccagatgcgccgttttctcataacgcctttctctcctttgtcagatgaatcagacttccatgatgatcggcaggatcatcgggctgcgcttcgtgcggttgtagagcagccgcgagagactgtcgcgcacgcggatcttgatcgcgctccactcgcgcacgttctcctccatgcactggctgatcgtgcggccgacgagcctgcgcgcctcctccatcagcccctcggactcgcgcacataaacgaagccgcgcgagacgatgtccggcccggagacgacctcgcccgaggccgaatcgatcgtgcagaccgcgataatcaggccgtcctccgcgaggtgctttctgtcgcgcagcacgatgctgcccacatcgccgacgccgaggccgtcgaccatgacggcgcccgccggaacgtccggcagacggcggataaacgcctcgttgacctcgacggcgttgccgatatcgccgatgaagatgttttccggcggcacgcccatgctcatcgcaacgcccgcgtgcttgcgcaggtgcttctgctcgccgtgcaccgggatgaaatacttcggcttcgtcagcgcctgaatgatcttgagctcctcctgacaggcgtggcccgaaacgtgcacctcgtacatcgattcgtacacgacgtcgcagccgcgcttcaaaagctcgtcaacaaccgtgccgacggttttttcgttgcccgggatcgggcgcgcggagatgataatcatgtcgtcctcgccgacggccacctgacggtgatcgtcgaacgccatgcgcgtcagcgcggacatcggctcgccctgactgcccgtcgtgatcaggacgatctggtccttcgggtagcgggaaatcatgttgaggtcgatcaagaggccgtccggcacatccagatagccgaggccgctcgcgatcgtcatcacattgaccatgctgcggccggaaagcgcgaccttgcggccatactgcgccgcgcagttgatgatctgctgcacgcggctgatattcgacgcgaacgtcgcgataatcagacgcttgtggttcgcatcggcacgcgcgaacatcgactcaaaggtcgcgttgaccttctgctccgtctgtgtgtagccgggacgctcggcgttcgtcgagtcggccatcagcatgaggacgccctcctcgccgagcttcgcaaaccgcgcgagatcgatcatgccgccctgcgtcggggtaaaatcgatcttgaagtcgccggtgtggacgatgacgcctgccggcgtgtggagcgcgaggcccaccgcgtcggaaatcgagtggttcacgtggatcagctccacgtcgaagcagccgagatgaatgtgcgagcccgccggcgtcacatgcagccggacatggccgagattgtgctccttgagcttgttctcgatcagcgcgatcgtcagcgccgtgccgtagaccggcacgcggatctttttgaggaggtacggcagcgagccgatgtggtcctcgtggccgtgcgtgatcacaacgccgcggatgcggtccatgttcttttcgacgaagctgaaatccgggatgacggcgtcgatgccgggcatctcctcatccgggaatgcgaggccgcagtcgacgatgaccatatcctcgccgcactcaaagagcgtgaagttcttgccgatctcgttgaggccgccgaggaaatacaccttgacggacggcttctgctttgcgctgcggcgccggcccttcgtctgtgccgccggctgctccgatgcgagcggcgctcttgcgggctgcttttcccgcgctgtgccgccctgcgcggcgcgcggcgcgcgcttcgtgcgcgtctccttcttcggcgactcctgcgccgcgggcttcgccgccttcttccccttctccggctttttttcctgctttgcggcctccggcttttccgcagccttcctgcgcgggcgcttcgcgggcttctcaatcgggtcggagatctttccgacgaatgccgcgtcgcctgccgccgcgctgagcggctggtcctgcttcttctggggcgtatcgccgagcgatgcgggcttaatcaatctgttcactttcttgtctgacaaataaataaccttcctttccaaattggacaaggcggcgcacggcgctgctccgcgccgcactgctgcctgtgaatcatggttttacttttttgttttccgttcaacacgtattatacccggcggcccgcagggaggccgtaccggcaaagcgctttccgcccacaggcggcgcgctgcgttaccgatccaaaatacaagacggttttcgccgtacacaaaagttatctctattttacgccatttgcccctgactgtcaagcgctccgcacgcagctttgcagtcggccgcgatccgcccgccgttcgggcgctgccggaaagcgccggagccggggccgcgcgcctccctgtgcaagccgcggcagctccggcgcttcgagcgcattttatcccctcagcggcgccggccgtgcagaaatcccgcactgcacagccgcgcggcttaaccccgtgcggcggacgtgctaagatgacaggtacaagcctgatttcggaggatgaaacgccatgcagatcacagcagagctcgtaaaagatttaatcgcggcgcagtttccgcagtggagcggcctgccggtccgcccggtcgaaaaaagcggacacgacaaccgcacgttccacctcggcgatgcgatgtccgtgcgcctgccgagcggcaaggcctatgaggcgcaggtgcagaaggaaagccgctggctgccctatttgcaggcgcagctcgatttcccggtttccgcgccgctcgccgtcgggcagccctccgcgcagtacccgtatttctggtcggtaaaccgctggattgagggctgcacactgctcgaggagccgcccgaggaccgcgcggcgctggccgccgcactggcctccgcgctgaaaaagctccagcagatcgactgcaccggcgggccggaggccggggcgcacaatttttaccgcggctgcagcccggcggtctacgacggcggcacgcgcgccgcactggacgcgctgcgcggccgcctgccaacagaccgcctcgccgccgtttgggcggactgcaccgccgcgccgtacacggaccgcggcgtctgggtgcacggcgatatcgcccccggcaacattttgatgcgggatcgccgcttctgcgggctcatcgacttcggcatcctcggcaccggcgaccccgcctgcgactacgcgatggcatggacgtatttcgaggcggccgagcgccgcgttttcctcggcgggctgagctgcggcatggttgcccgggcgcgcggctgggcgctgtggaaatcgctgatcacctacgacgacgagaaccccgattcccggcaggccgcgcgccacgccgtgcgtgaaattctcggggaaaccggctgaccgccgcgcaaagccgccctgttccttaaattgttgccggatttccccgcgcctatacgccgtgcgcgccgctttgcctgcacagccgaagcgctgcgccgtgcccaagacagcgaactgcggcaagctcgctttgcctgcgcggccgaagcagcgcgcggaaagctcgatcagcgccaccggccttttccgttcacgcaccgtacgcccgtacatcggcctgccccgccgttgtggtgccgcccaaataatcggcccgccgtcaggcacctcgcttttggcggcaggcgttttctcaagcgcgcggtcccgcttatctgcaaaaatgcctttgcgcagcatgccgtacccggctgcgccccgcggctgaaagcgccgtgcgcacttgcgccggcagaattaagcggggctgcacggagcctcttgcgcgcgtttcggcatattgtattgctttcagctctaaattttaacaaaatttgaatttttgccgatatttgcatttccctattgaaaagtataccaaattggtgtatatttgtcttgatgaggaaagactatagagaacgtcagccattccctcacaaaaaatacaatccgaaaggtactgataaagctatggaattaaacggcaagagaattgtttatgcagacaacgccgctaccacggccgtctcccccgctgtgctcgacgcgatgctgccgttttacaaggagctctacggcaacccatcgagcctttacgcgatcggcaacgctgcgaaaaagccgcttgaggaagcgcgtgaaaaggtagcccgctgcctcggcgccgacgcgagcgagatctatttcacctcgggcggcagcgagagcgacaactgggccatcaagggcgccgcccacaagctgaaagcaaagggcaagacgcacatcatcacgagcaagttcgagcaccacgccgtgctgcacacctgcgcggcgcttgaaaaggagggcttcacggtcacctatctcgacgtgcatgagaacggcatcgtcgtgcccgaggagctcgaggccgcgatcaccgagcagaccgcgctcgtcacgatcatgtatgcaaacaacgagatcggcaccattcagccgatttctgagatcggcgcgatctgcaagaagcacggcgtgctcttccacaccgacgccgtgcaggccgtgggcaacgtgccgatcgacgtcaaggcgcagaacatcgacatgctttccctgagcggccacaagctccacgcgccgaagggcgtcggcgcgctgtacatccgccgcggcgtcacgattccgaacctcatcgacggcggcgcacaggagagaacgcgccgcgccggtacggaaaacgtcgccggcatcgtcggcctcggcgttgcaatggagaacgcgatcgcgacgatggatgagaaaaacgcgaagctgcgccgcatgcaggacaagctgatcacagagattttgaaaatcgaccgcagccgcctcaacggcgaccgtgaaaagcgcctgcccggcaacgtcagcttctgttttgagggcattgagggcgaatcgctgctccttatgctcgatctcaagggcgtatgcggctcctccggcagtgcctgcacgagcggctcactcgatccgagccacgtgctgctcgccatcggcctcaagcacgaggtcgcgcacggctccctgcgcctgagcttcagcgacatgaacgacgagagcgacatcgattacattctggaagttcttccgccgatcgtcgagcgcctccgctcgatgagtccgctctgggatgcaatcatccacggccgcaccatttgagaaaaaacagcgatttgcttgaaaggatctgactgattatggcatacagtgaaaaagtaatggaacatttctcgaacccgcacaacgtcggcgagatcaaggacgcggacggcgtcggtgaagtcggcaacccgaagtgcggcgatatcatgcgcatgtacatcaaggtggaaaacgacacgatcgtggacgtcaagttcatgaccttcggctgcggcgcagccatcgcgacgagcagcatggcgaccgacctcgtcaagggcaaaaagatcgaggacgcgctcaagctgacgaacaaggcggtcatggaagcactcgacggcctgccggctgtgaaggtgcactgctcggtgctcgcggagcaggcgatcaaggccgcggtctcggactactaccgccgccaaggcatcgacccgaccccgatcgtcggcgaactcgaagagtgcgaggaatgcgcttgcgaggtgtgagacgcagggcgtttcacctgactgcattgaattgtagattccataaagagtgttcagtataacatctggattagaatggattcatcacaactttcaataagcatccgttttggggttcgtaagtatttcaattgctttctctggtatgcaatcggagagagcaattgttttattcagcatactcttctctgaatataaatcccacaggtcgccgatatgtgaatctatcaatcaaaatcaatattctgcactttgaaacaccaatgttaaagtctgccggaaatccacaaattctgtaccgcttgtattgcgtaaaatttgttttttcctattatttgtgttgcaatactgtaaggtttttgctatactaatcttattatgtcgattcatctgacaatttccaagttttgcaaaggaatggtgttatgaataatactgctgagtatgaaaatgaaattaacttaaagaaactatgcatttatatcttgcgaaaatggaaggtgctgcttattacttttgtagttggcgccctccttttgggtctgttaaaagctttttcttctcccgagccggtaacagacactgcactggtagaagcaaaccagactaaaattacagagtatcagaccgcgctgagcacaaacaaaagcacaatttcatccaacaaaaatcagatcaacataaacgaagcggcaattgaagatcaaaaccagacacttaaagacctgcaggatgttctggatacgcatgaacagatgctggatgagctggaagccatgcaggatgcaggcctgaccaatgacgagcaggtcgttgtgttggatcgcgctgcggagatgaccggcagaatctacgatctgaacgcagagatcgccgatgttcgggaaagcataaccaattatgaaagtcagatagaaacgctccagcaggacaacgaaaatcttgaagccgcaaataaaaccttaaccgcaaacatcgaaagccagcaaacggagatcgaccggctgacggctgaaatggagccgaaacagatgtcggtcagtatagtcgatattgttacatatacaattatcggtgctttgctcggtatcattcttgtgtgtatctggctgtgtatagaatatatcttcagcaagaaattaaaagacgagcaggatttggccggacggtatggtttttatattttaggtgtatttaacgatataaacaccaaacagcaggatcttatcaaccggttattggacaaatgggccggtatcagaagagatcagaacacagaggatgaatatcgcctcattgctgcaaaaattcagatgtccgagaacaagcagtcggcgcatcgtctcatggtaaccggtacgcttccgttcgaaacacttcaggaggttgaagctaaattaaagagtttcctgcctgccgaacaatatgaaatccatgctgcggaaaatctggcatataactccgatgttctgacacagatcaagcagtatgagattgttttggccgaaaaaaagaatatatccgatgttcgtgaagtcgaaaagctcgctgaggtcttaaaggtaagcgaagtgcatgtcgttggtgcgattgttctgtaagctttgagatttagggtaagcgtcaaactccagcaacgcagtaagcaaaaaaaaggcaacagctccccccagatgggatggctgttgcctttttcgataaggtagaaaaggatagagaaacatggtttgcagaactctggcggaaccgttctctggaaggtgggaactacttataatgtctatatggatgggatctacctacgccgcaactaaggcggaaagtttgaaaatgtagctgttctggtggcgattgcggtcaatgaatacagataccgtgaagttctgggtgccgctgagggcatgaaagaggacaaggccagctaggtccagtttcttcccagtggctgaatgggggggggaattggtggttggcgacaagtggctttagtgtgttggaaactgtaagagaagtatgtcctcaggccacgtaccaacgctgtaccatttccttttaccgcaatgtgttctcggccacacctcactctaaggtaatactatggcaaagatattcaaggtaatccacgcctagaaaagcaagaaagctgctcaggagaaagacactgtgatggaataactgtgcgccatgaagctgaaataggccgctaagaaagtagaagatggcattgaggaaacgctgacttactacgattttcccagtgaacactggacccgcatccgtaccaataacgccattaaacggctcaaccgggagatccgccgcacccgtgtggtggatctcccggttggcaactctgctctcatgctggcctgtgcccaattgcgccatgtcgccggcccccagtggggcaacaagaagtacatgaacatgaagcatctgtgggcttccgttgaggacgactccacattgctggctgactttcctcatgtcagagcctgcaaattaaatttacaaaaaattcttgacactaccctgcatggcttcgataaccatcttcttaaattccggtttgtatcgtttgtttggtattcctttgggcataataaatcaccccacttgttttccaatataccatgacaaatgggatgcagttcaaaaacaaggttatacatttggctctgcatttcttcgatatctactaggcaggaatcaattcctctgcccaagttccattggttgtttgtaccacaaattcagagaggtatgctttagaactcaccgcaagttttcttggcagtctcagtcaaactgtaaaagactgtgttgctttccacaacactcggtacagtaaaactctcctgtcggttcaatgcctgtaaacttctctccataatagtctcagacaataccttccagactctaactctcttcgctattataaagatatttcctcacgtcagttgcattccggtaaatcaaagctaggtttaacagttaccttggcctgtcatatcaacatctcggcaatcctttcttgcagctcggccaaactatgattatgcttgtccttctcagagagccgaacttcagtagtcggccatttcacatcaatatccgcatcatcccaagccacgccatattcatcgtcaggctcatagaggcgagtgcatttgtacacaaaagtcgctgcatcagacaacactacaaagccatgcaaaaaaccttccggtacaaaaaattgcttcttgttatcagcagaaagcaacacaccgtgccacttaccaaaggtagggctgtcttttcggacgtctacagctacgtcccatacttcaccattaattactcggaccagctttgcctgaggatggctaaactgcatatgcaagccgcgcagtactccttttctggatttggactcgttatcctgaacaaattcagctacacttccatcaatatgcttcagtaggaacttgaattcgtcattataggtctccataaagtatccgcgatcgtcgccaaacaaagtcggttcaatttcatagagcccttcaatttttgtttttataaagttgaattttcccattagtattctatctccttcaaatatctctttactgcatcctgccaagtcggtaacggatcaaatccattctcaatcagtttgctcttatccaaacgactgttaaacggtcttgctgctttactcaagccatactcttccgttgtaacaggcacaacattggtggcatacccagcttgctcgaaaatctcacaagtaaaatcataccaactgatgtatccaccctcattggttgcgtgataataaccatacttatcagtttcaaccatatccacaagcaaccgagccaaatcaagagtatatgtaggagtaccgatctggtcgttcaccacacgaacggtatcgtacttcttgcccacactcagcatggtcttgatgaaattcttgccgtttaagccgaacacccaggcaatgcggacgataaagtatttgtccagcgtattggcaaccgccagttcgccctcaagttttgtttgaccgtaaacattcaagggcgcatactccttgcaatctggctgccaaggctctgtgccctgtccgttgaacacataatcggtgctgatgtaggtcattttgcagttcagtttcttacacacatcggcaatgttctgtgtgccgcctgcattgactgcacggacaagcgcaaccttgtcgtcatcctctgccatatccaccgctgtccaagccgcacaatggatgacggcatctggcttgatttctgtgatgaccttttccacgctctcggtatcggtaatgtcaaggacaatatagggcagggtcgtaacaggagagccatcggctataccgctgtaaacctctgccacatctgttcccacagcttcgtgccctcgtttatataattcattcatcacatcgtgccccaactggccgttgacacctgttacaaatactttcatgtcgaactcgctttcttatctatttccatacatcttctcgtagtaattctggtactcgccggagatgatggtttcccaccatcccttgttgtctaggtaccactggatggtcttctgaataccatcagcgaattttgtctccggtaaccaaccgagttcatcgtgaatctttgtcgggtcgattgcataacgcatatcgtgaccctttctgtctgtcacatatgtgatcaggctctcgggcttgtccagagctttgcagatgatcttaacaatatcaatattcctcatctcattgtgaccgccaatattgtagacctcgcccacatgtcccttgtggatgatcaagtcgatggccttacagtgatcctcgacatagagccagtctctgacattaagtccttcgccgtataccggcagaggcttgtcgttgagagcattgacaatcatgagagggatcagcttctcaggaaaatgatatgagccatagttgttagagcagcgactgatggtcacaggcagaccgaaagttctgttgtaggcctgaacaagcaggtccgcagatgctttcgatgcactataggggctactggtgtgaatgggagtctcctcagtgaagaacagatcgggcctatccagtggcagatcgccgtaaacctcatcggtagaaacttgatgatagcgagtaattccgtacttgcgacaggcatccataagaacctgtgtacccagaatatttgtttgaagaaaaacctccggattgtcgatagaacggtcaacatggctctcagccgcaaaatttaccacaacatcgggcttttcagtctcgaaaatctcatagatcgccttgcggtcgcagatattggtcttgaaaaacttgaagttcgggttcttcatcgcctctgccaaagtggacatattgccagcataggttaggcagtccacacaaaggattttgtagtcggaatacttgcccagcatatgatatacaaagttggaaccaataaagccggcaccgcctgtcacgagaatagtcatactcttttacctccctgttttctctcttaatacttgatttttccgtctgcaactgccatcagatgagcaccataaggagatttaccatacttggatgcggattcgataagcttctccttatcaatccaaccatttttatacgcaatttcctccggtgcggaaataacaatactttgtctgttctgaatcatctgtacaaacagtgttgcctccgcaagactatccattgttcccgtatcaagccatgcatatccacgccctaaaagctgcacatcaagtagttcgtccttaagatacatctcgttgagtgtagtaatttccagttcaccacgagcagaaggtttcacggcattggctctggtagaaacacctttcgggtagaaatacaatcctgtcacagcataattgctcttgggctgcgtcggtttttcttcgatggagacagctttaccgttctcatcaaaggctactactccgaatcgctccgggtcattgacatagtatccaaacacagtagcacggttatttttctctgcattttctacagaagcacggagtgccttgctgaagccattgccgtagaaaatgttgtcgccgagcaccatcgcacaagcatcgtcgccgatgaattcttctccaagaataaatgcttgggcaagtccgtcaggagacggctgtaccttatatgaaagatttacaccataattcgagccattcccaagaagcttttcaaaattcggcagatcagttggcgtagagataatcaggatgtcattgatcccagctaacatcaaagttgccaaaggatagtagaccattggcttgtcgtagatcggcaacaactgcttagatgttaccattgtaagcggataaagacgtgttcctgcgcctccagcgagaataatacctttcatttcgtaaagcctcctacaatatagttacggtcataggcacggcagccagccgtgtctatttccatctaaaagccgaagctgttagaatgcgagagtaaatggtctgacatttttcgccttgagtcaacacgcccgcatgggagtcagtcagccgcctctttcattcgcagcattcgatttaaacaggttgagccaccatttcggtgagttcgcgtcataccacagaagattgaacaggcaatgagtaaaagcggccgccatgaatttcaacatcaggaggtacatcaaatgaacgcagtcggtatcgatgtttccaagggcaggagcatggtggcaattctccgtcctatgggtgaggtagtccaaacgcccatcggtgtcatacacaatgcagtcagtctggaacatttggcacatcagattctcgcgttggggaaagatacgcgcgttgttatggaggcaacaggacgataccatgaaccggtcacagagaactgcatgcctatgggatattcgtttccgtcatcgatcccatcgccatccacgggtattgcgcaggcggtactatccgcaaggtcaagaattagcggaaggatgctctgaaaactacacgatttgctcttgaccgctggactgaattgcgcaaatatccccctatggatactttgagataacaactgaagatcttcagccgccagtatgatctctaatatgaaatcctgcgcggcactgcaaagcagcctcatttcactgaccgacaaggtgttcccgggggtcaacgaattgttcaagagcccgcagagagcagatggtcatgagaaatagtggactttatctcgatcgtttggcctcgcgagtgtatcagcatggtcagtgaaaatgcattcacagagcgataccagaagtggtgcaagcgcatggggtacaatttttctcgaaccaaggccgctaacatttacatcaagagcctcagtcatatcgttacgctgcccaaaaacagcagcacgaagctgctgagccagacggctgctaaggagttgactgcgatgaacgagctggttgccattgtacgcggtgagatgactcgtcttgcaaaggagctgccggaatacgaaaccgttcacgccatgtatggcatgggcaacacaactgccgcgcagcttatagcagagatcggcgatattcgtaacttcccccgcggcagctccctcatcggctttgccggtgttgacccggcagccgctgactccggcaagaatgtcggcaacagcaaaccggctacgaagcgaggctccccgcagttgcgcaaaacactgtttcagatcatgacgacctatctgcgcctgacaccgcaggatgaacccgtataccaattcctcgatcagaagcgctccgagggcaagccgtactatgtctacatgacaagccggtacgaacaagttcctgcgcatccactacgcccgtgtgaaggaatgcgtggcagatctggatacgcctgccgtgaacagagaaatcgacagataatctgcttctggcacctatcagctgatgagccatgttgctcaccggttgctttgctgtaccttttttactcaagtcccgattgaactttctcttaaattgggacttgactttttatttgcaggctctcattttaaatatgtattcattgccatgagcttgacgtcttcataaggagttgaataccgtttattgcaatgaagtagtgttatctctgtgcagccgttaaccagctatttcggcaatcttggactcattatcttgaacgaactcagcatcttttctttcgatgttctgtcaatagaaacttgaattcatcattttataaatcttctaaagcaacttaccgttagagtctcaattaatgtactttacaccatatcccatgtgagaatcgtatcttccggtagatcgcacttcacaactcgcccgatcacaatgtcagtatattggggtgagatgcccgttccaggacgtttcggcatcatgtcctctgccttcagcatctcgccagctttcatatcacgagttagcacaagggatcttctcgcctctttacgaggtacgaattcgcaatcaagaaccgtcttctctggtctgcctttcaccatatcgatccacttaaagttggctatagcctttttgaaatcttcggggtctcctgcgtgataatggtcatttcctgataaggttttatctaatgtgaagtgcttctcaatcacctctgcacctaacatatacgcaaccgccaatgtcatcatggtatcatcaggtgcaacatgatcactaaatccaacacgaacttgagggaatacctttttcaaggtcgaaattatttccagattcgcatctttaggatctgtgggataggatagcacacaatggaacagaacaatatcctcgcatccctcttcgacaagaatcctgacagcttcatctacttcagagatgtatgctgctcctacagacatatagacaggcttacccttttttgcaatatgacggataaaaggtaaattgctcaaatctgacgaggataccttataaaagtcaaccatgctttcaagataatcagccgacgcataatcaaaaggtgtagaggtaaactgcattcctttagaatgagcataatcacatagttccctgtactctgcctcgccaaaatgatcgtgtttcaaaaacaactcatattgtgtctttgtaggttcctttgttgtgtcccaataggcaggcgaattcttggaaacaattgttcccgccttatatgactgaaacttggcacaatcaacacctgcttctgatgccgcatcaatatacatctttgcagcttccagtgctgatacattcaaagcctttgcagtgtcgtagaagttaacacccatctctgcaattacatatggtctattcatttttatattctcctcattcatttgtctcttaatgattcaaaatcaagctcattactcttttgcgaccattacgaagatcgtgactaagcaaaatatcttgataatgctttcgatcttctgctgaaagttccagatacatttttaatgttccctcaataacagaatccggcgggtttaatccaatataggtaaagccattctcgttacacacaaaaccatgcttctcttcacgctgattctgagccatagcaaccgatggaatcccaagaatcgccagctcatagccagtacgaccgcgagaagtaattccaatatcacaactagtcatgatttccggcatattggaaacatcaaacttcacttcgatatgctcctgcttgttatatttcagaagtgcatcaacattcttcttggcgcgccccagaacaaccgtgaaatgatattttttgtattcgtcttttgagataattttcaaaagtcggtcagaataattttgcggatcagcaccaccgaaactaacgaaaacatttttgacagtatctctaatttcaataggttcgtagaacataaatgtcttaccagatatgtaatacttctcaccggcatatacttgtttgagatctgtctttgaatacagcgcattgaatacgagatcagccttcaatattccttcgccatcatcctcgaaattgacaatctttgtattcggaagtactgaacgtaatccaatcatgtaatcaatagaggtggttaaaatatcgtttataaacaccatgtactgcttttctttacaaatttggaaaagctctgcgattccatctaccggtatcaggttatgtgttgttttaccaaacacttctttatttgtctggttgctgtcataatagatatccggctttacaaagaactcatctgccagttccaacgcacgataaatatggccgataccacgtgtgttgtttccgtttacatagattgcaactttctgctcatccagagtcgctgcaacactccgcaaatccgcaaaggtatctacatccacagattcgttgtccgggacttcaaaaacgctgacttttgcaccaattcttgtctgcggtgtaacaacagatgccttagatatcacaaatgcacctgtttctatgtagtgcggaggcaaatactgtcgatttaatctttttgtataattaggtactatttttccccctttaatctcccaagaaagatggggtgaattgatcaccgatatcaatgtatctaaatcattctcgattgcatgtgctattgcctgatccagcgttttcactttcaatgttggtgatgtaggttgcatcgtaataatatagtcccaattagtatcccttggaacagcatcggcaataaccgcatctaatgttatatcatcgccacacaattcctcattacgccagtggcattttactcccatttgctgtgcaataatgcgaacctccggtgaatccgtggaaacaactacatcagtaatatgtgcagagttaattgcatttttaatggcgtagtaaatcaacggatggccacctacaatacggatatttttattcggtattccttttgaacctgctcttgcaggaattacagcaacaattttcatataagtcgattttttcagtcatgccatgctcacacaagtgatattaaactaatgtggccatgaactgcctttcttaaataatttataattacgataattgcgtttaggtcatcattgcatcaattgctaattcggtttaacgattccaataattccagtaattgaattttaaagagtcgattatctatgttcccgtcttgaggttttagatagtcattaataaactgacagtacgcatcttcatctatcctcaacctacttgtaacattatttactggttcactaatatcgcaaacttgtgtatgtagtaaacgtgcatacttttttgttccgttaatcatgcgtttattcgcctttatatcactccctgtcactaacaaaatcggtttccaaaatattgtagcataacaaatgctagtggaaaactgtgcaatcacaaattctgcatcacggatcaactctgccgttttaaaacgaaacttctcgtatttattcaatacatcgttatgcagggtataatcacctcgcggatgggttgcaataacgacttttaaacctgtttccttttcgatggttgtaaataatccttccagttccgcatagtaccgtacaggatccacgacatctcctatgccaacgccatctggatggtagggcagatactggtctatgaatacgcaatacttttcttggataagacgttccttgtcgacacgcacctgtaaatacttgtcatagtctagtgaatgaatgtgcttaattttcgtgtgtttgtctgtcacgcacaagcggatatataaatcccgattctccataccgccgaggataacaaaatccgccgctttcatatgccacaatttgcgaggtaaccgtgtaaaaacagcgttactcaaacggtgcagagaaagattccgaagtagatcaaaccatcggttggttatcgtttcttcatccgcttcaacattcgtatccattctatacatataaccatatttttggtcgcgttgaattgcggtatgtaaaaaaagtgtgtctagatagaagtctgtaataatgataaaaaatgcctcagctccggctttctttacataatccttataggcgcgtctggaataaaatatctctcttttgggttcactaatcacacccgtgcgaactatctcatacgcggcaggattgacaataggggatgtatcaaggatgtgagtttcatagccattttcttccaaatagtcgatacaatatctatggtaataggattcaagtggcggtgtcacaaagacaaaataaattcttttcatatatcccaattcctcctaatggtatctcaaagttccatttgcaacagcaagtggtattttatccttcgtggtgttattttcattctgctctattccctataaaaaagtatcctttcgttccgccattgacgggattagagcaaaatgccaatactttatccattcttttttctccttagcatcctctgtaaagttcccttagatacaccgatgactttcggattgcaatagatatatgctccaaggccccctgtgtaaacaacgcctgcaagcagaatacgcagaagctcatccataatccccatatccggaatcggcaaaacactgcagagctgcagcaaaacaaaggacaaaaccgagcacaagaggatgggatgcaactgcatacgaatgataacacctgtggggatcccaaatcttttacatatatatacgaccatcaccgtggttgcaatcagatttgcacaaaagtaattcattccaatacctactgcacccaatccgtttttccagatagcatttggcatttggaacaggaaaataaaaacgattgtaagcaactgccccatagttgaaatgaacgcataagctttcgtcttttccgttgccaacatataggagccgcctatctgcccccaagcctgatatatggtgtaaaacatgaccacgattacaaccagtccaatgtcggcataagtctcgccaaacaccaccggaagaatccacttcgacataaaagaaataaaaatggcaaaatacgtcgtggcccaaatcattaaccgaagcgattgttcaaatcgatctttgagagcccccggctggtcatgaattaccgcaaactcccttttggacagttccgcatagggattaaatacatacgaaagcagtaaatttagctgccaggctacaccaaaacatgcttgctcatttacgcccgcccaattcatgagtgcccagttcatcataataacagtgaattgcgaaacaaatgttgccggaatgataggtgcactaaaggtcaggtactctttccaataatggcgaataccaaggtctttttttacatattttttattctgatttgtaatcagcacccacagcaagatacacgcaagaatcagcgtaatcgaaatttgaacgatatataaatagagcagatgcaattttcccagaaaatatccagcaacaacaaacacactaattagaacttttaaaacaatttgcccaactgcaggaacccttgaaatggcacaggcatcatatatcaagatgcagtctgtaagtaacttattgacgattgctacctctaagcccaacagaatcgtaagcagcgtctgccctgcaaatgtatcccgcagcacgccaacagcatataacagcataagcagcgcattgatggcaagcgctatcgtaatgtagaacttcaaatagaaattaactaagccgatttcgtcattcctcttggcatattttgcaacaagtgcattggaaaaagacaggtttccgagtgtaacaaccgcagtaaatacattaaggttgtaagtataaaaaccgtactcctctacactgaaggcccgcggtagaagcatttgcacgatcatattgatcaccacgatcagcacagagctcagcatttttatgatatacctgtatttgaaatcatcctgtttcataatcatcgtttatgatatccctaaatatcagtctaccacaatactccttaccgttcaatttaccttgcatattggtcggcagcactatacttcgcaattacaaaccccactcattttggacaaatactgtcttgtgctcatcaaagccaaatccttctcactgataattagtttttcttttcctccgatcaattcaaagggccactggattccaatgtccggatcgtcatacataatacccgaatccccctcgccgaagaaaacctcacttgccttatagctgacaatggagtcatcaattaccaaatagccatggccaaaatactccggcacatacagcatctcggtgttgtctcccgtcaaatggaacccccgccactgaccaaaggtaggagaatccggacggaggtctacaatgacatcatatacatgaccgctgatgcagcgcaccagctttgcctgctgcttgaacaattgaaaatgagtggcacggatcacacctcgtttggaaatggtataaaacacttctttcagttcgtggctgatcccgttggctttgaacatctccaaattgtagtccttgatcagacccccgcgatcgtccgttgcatagaaaggcttgatatgataagcacctttcaaatccaattctgtaaactcaaatttctgaatcatttcccgtttctctttcctctctcaagatgcagacaccgtttcttggattctctctgtaaaagatttcgtcacatattcaccaatatcctgaaccaaagcagttgtatcaaacatatcccatgtataaacaatcccgtcatccggacgctttccaatttggataagcacttcccgatcagcgatccgtccaacctccagcagatactctttcagcacacgaggcgcgccggagccaatatagtacgtattcctgctagtggcacggtctcctaagcggtataccgcttccagtaaatcatctacaaaaataaaatcatagggctggcttgccgatccaaaaagcgcttcccggccactcagtatttcacccagagtatagctgatcaaattaccggtcttgttctgtgcaccgtaaatgttggaaaactgcatccacacaaagtccaatcctatgctcttacaataggtttccagcataagatgcgtacagtgtttcgccgcaccatacatcattccaccgctggttttctcaagatgcggtagactgttcaccgcctgctctgcaatggttccagcacataagaatttcccacatccaatatcctttgcaacctttgcgcactttaatgccatttgtgcgttattcaactggatgaacggatccgctttcgttactccattgaccccttgccaagccaaatgataaaatacatcataaccatcttctacagacagggcagctatcagtctttcggtattatcaaggctcatctgtattttggtaagatactcactctccggtaagatgctgttttcaaatgcaacgtcaattgcaacgacattcacctttttcccaatcagtttcgttacaagagatctgccgataaaaccgtttgctccggtgataatgaccttttgcatacaatattcctccatttaggatagaaactccgcgatttgcttatccatgcaggcacagatatcgccgtctgctctccagcatttcgtccactccaccaccatctcaatagctgtatccagattccagcggggtttccacccaaaggtcgccttcagcttggagcagtccagcttcaagaaattcgcctcgtggggaccgccatcgaaacggttaatccacttaataccttccccccatttactgacgaatagatccaccaatgcgccggtctggaagcagtccacatcgtcagggcccacattgtagtaacccgcgtattggaaattctcgcactgcttagctgcgatcatcaaataggcatacagtggttccaacacatgctgatagggacgggtggagaatggattgcggacaatgatatcttcacctttcatggctgcccggatacagtcagggatgatacggtcattggcaaaatctccgccaccaataacattgccggctcttgcagtagagatagccacccggttatcggtaaagaagctgtttttatagctatgggtcacaagctctgaacaagacttggaattagaatagggatcgtatccatccagttcttcattttcacgatagccccaagcccactccttgttgagatagaccttatctgtggtcacattgaggaaggatctgacacaggtactctgccggacacattccaaaatattcaccgtgcccatcacattggtctcataggtatacacaggggctttatagctatcacgcacaatgggttgtgcagcaagatgcagcacaatctccggttgcgcctcatcaaatgccgctttcagtaccggtagatcccgaacatcaccgatcacagagtgaatatctcttgcgatatccgccacctcaaacagtgaaggcgctgtttgaggatttagggaatagccggtcaccttagcaccagcattcaccagcatcttgcaaagccagcttcctttaaaaccagtgtgtccagtcacaaatatcttcttccctttataaaaggatatatcgaacataatcaatcctcccagagcttccaaggcgcttgtccgctgttccaaagcttctccagcttctgcttttcacgcaaagtgtccatgcactgccaaaagcccttgtgggtataatacttcagttgatgctcctgcaccaatcgattcagcggcgcctgctcaaagactgtgctgtccccctcgatatagtcaaagatctccggctggaacaccatgaaaccgatatttatcaagtctccgtccaagtcagacttttctctaaacgcattgacatagccatctttcccaacatcaagtacgcccttgttttggccaaaattgtacaccgaaatggttccgatacagccatgagaccgatgatatgccatgagctccttgatattgatatcccccaccgcatctccgtaggtcatcataaacggctcattgcccacataatctttaattcgcttaatacgtccaccggtcatggtattcaagcccgtatcgatcactgataccttccatggctcaacatgcttgttgtgcacaatcatctcattaccgttggtaaaatcaaaggtaacatccgatgtatgcagaaaatagtctgcaaaccactccttgatcacatgctgcttgtatccggcacaaataataaactcgtttatgccataacaggagtattccttcataatatgccataggatcggcatacctccgatctccagcatgggcttcggcttaaatgctgactcttcagaaattctggtaccaaatccaccggctaaaatgacaactttcatctttgtacctctctattacagtttcaacaagtgcagaatgactccagcatatgacttccaataactccagtcacactgtattgcttttttatacatttgcagtgcatcttttctattttttgacgtcgaaagctctctaccacatccacaataaatgactgcaaaaatatgtcgcttctttttttgtatgaaagaaacttcttcgactttttttttcatcaaataatcaaagtgtttctccaacatagcaataacagcctcagcatgagcaatatgcttagcagaaacactatcctcccgaacagtccatacacccaaaggttcctcaatcatatgacaaaccgctcctgcccgggccagtctaagccaacaatcgtaatcctcctgaccggagacaaggctgatatcaaacccaccaatgtttttcagcagcttgctcttaattaccatagcagatgttgagaagcaattcccttgaaacagcaaatcttcataagcatcgttattgtctatttgtctgtattcaccaatagtacatgtatttcctttaatgtgtttttcccaatggcaaaacacatcgctctctggattttcactaatatattctttaactgtatggagtttttccggacaccaataatcatctgcatctaaaaaacaaacatattctcccgtagtcagagaaattcctgtatttctgccaccactgattcccctgttgggctccacgcgatgcaattgaatattcatatccggattatccttgacgaattgtttaatgatgctattcgagtgatcggttgaaccattatcaacaacaatatattcataatctttttccgtttggtctctcactgaagtgagtgcttttttgataaaggcttctgcattatacacagatgttacaactgaaaaaagaggcatattacatactccttgctgttaatcaaatagttctctcaatgtaacaatgtcaattcgatttgcatttctttcttctacgagaaaatcacatagcttcacaaacctattgtaatcccatgtccacatactgttataattcgcttcgccgtctttcagaatactgtgtagcattaaaacacagtcacgctgctcccgttccgccatattgattaaggcaatcacctgctttacagtatcgggatgtaatacaggaacagagtatacaaccttctcctttcccacgtactgaagcgaagatttaatcggtaatgtatacagaaatgtattatgggtcattcttgcaatttttgagataatcctctgaagataattgaactgattttttaatgcaatacgcacatatttgacgttgaggtgagtaagcgtaacttcccactcccgaatctgcttggaggacataaccgaatgcgggctggcaataccaactccgtgggcacgccatgattctcctaaccattgctccagcatgtcaaggcctttttcccaatcctccagcgtattcaaatgctcatgaccatgacctacaatttcaaattggcctgttgcatacagtgctttcactttatcctgtgtcaacgctgcattattttcaggtctgttggccttttgtatgctaccatccacataaccggtagttatactaaacgcagccgttaaattacgcggttgaaggacttcagttgcaactctgtagttgtcctttcttccatcgtcaaatgtgagaacgatttttggtttatatttttcaatcctcttattatccattcactttttcctcaaacaagtgattttatggcggatccgtcttctccaatattttaacatcaaaaagaaacaaaagaaaacatagaagcctacggatacatatttttcatctctcagttctcgcaggttcttcatttccccctgatgcattccctgaagattggaggtcagccccttctccccatgaaaactttttcccaaatcaatgtccaccagtttttccgggagataatagtagttacaatgcacaacgaaacgcatataatagttcatatcctcgcaatatgactgtgtttcatcaaaataacccactgtttttactgcatcccgccgaaagagcaccgacggtgtcactggaaaaaaactccagaacaaatcgtatagatcggccttgtatagctcacgaatcacttttcccttacgcacgaaaggtttgtttaaatgcccggtacccaaaaagacaatttccggatgattcttgaccgcttcaatctgcttttccagtttgtcactatgccatgcatcatcagagtctaataaggcaacccatttggaggtagacaatcgaatgccatgattgcgggctgacgatacaccagcatttttctgcttgatataagtaacgggaagttccgggttgctttgcatgtaagccgcaacacattgttctgagctatctgtcgatccgtcatcaataacaaatatttcctttatatatgtgatatatgtctgattctttactgagtctaacgtgtctataatcgttctttccgcattatacatcggaatcacaactgaaacactttcttctttcatatatataaccattcctttcctctgcgctgaaagacactaaaggggatgaaacccagaagctctctaactcagcaagctaaaatttgttagaatatgcttgggaaagcagacacacgacactgcatgtggaggtaaataggttcaagcatacgttagactgtatatatgtgtgccggatgctctttcaaacaccaataaatagggcttcgaaccctgtaaccttatctttggagagacggattacttcaatttctcaacaagcgtctagtccctacctgctcccccaaatactgttttgaggaaatgtgttatacttaaaatcgtttactgtgtctgctttgggatggatgttcacaagtcctttgtcgttgcctgtatcgcttctaccaataaacagggaatgacggcctacaatcacaaacggttttctacctttactggggatttacgccactgtacaatttggttggctgagaatgactgcaaagatgtgtgcatggatttcacatggaagtattagattcccatctacaacattttggaacgcacctgcaccattgtcttcactcaccctaaatatgcgaaagcgattcgagataagaaaaccgctaaaagcgacgccaagtggattgccgacatcttcaaacacgaccttgttgcaaggagttttatctctccggcagatatccgccaacttcgggatctgtttcgttatcgttgaaaacttaccggttttaccactggtgagaagaaccgagcgcaaaaccgtctgaccatctccaacttcaaacgggacgatgtattctcagatgtattcgacaaagcagcctccgcaataaccacacggattctcgagaatccgaccgagaagattatggatatttccggctttcgtaccaagggaatgaaagcgaccactgaagaaattcttgctgctgtggacggagaaatgtgtgaagaacaggccgaaaagctctgcatcatccgttcacacatggacggccttgaattttacaagcttaatctagaatcgctataattctgacaactgctgagaaataccttcctcaaccgggtcttgttatgacggctccgggtatccaatccttgccgctatcggcatcatttctgtgatcaaagtggatatatccgtattccaccctcgaagcatctctacttctgggcgggtcttacgccctagaacaacgagaacaccgggaagaagaaaaccaccagaatcagtcgggctggagcctacatcaaaccattgcttgttcagtgtgttctttccgtcataaaaagctaagaagttcccgaaaatcccaaccgctatctcgccttaaggaagcgccgaggtcacaaaaagccattattaccattgcaagaatactcctaacagctatccacaacatactcaaaaagaatgaaacatacagtcttgagctttaccgtaagggccacctgccacctactcatagatttctgtggaggaagccgctttcatcctccagcgacagggattatctgataacagctccgccaatcgcttaaatctcaatcacaatttcgattttagcccaattttaggtggcttggttttgtgcgctcttttttgaaataacacttaaatcacaatgtttcaaccttcctcccaccatcagtcaagccaacatgttttttccatacctatcgccacacgattcgtctccctgtctttcccttaaatggaacaagtagaacaatggcaaacagaaaaaagcgaaagccggtcaaattgtcatgtaatatacagcagcaaatcagataaggataaatatagggtatcatctctttacaagtaacatgatcaacaattctagatagtactagtaaatatataccaccaaagcagatggaataatacagcagaatgccatggaacgaattatgtgggccaacatttggcatcaatatatcatatttgtccaaatatggttcatataagctgatcatatccaatcctttaaagaaaaagttttctttgatcatgatctcattggccattttcatcgtggtaaatctctccatgtttgcctgatcaaacgccgctccatgcccctctataaccgcaaaatactgtgacagcacgtcaacccaaaagtaagcaagcagcgtaattgctataaacagataaaggataatgagtatggtcttcccaaataacttacactgtaggacctgcgcaacaaaacctttcagaaaatagaacagtataaacagagcgagaaataggaaccatgttcttgcgggcaataccgcagacgcgattattgccagtattgcagaagtgcagcaatatcctcttttcatgcccagtgtaaaggcaaaaatagcaaacatggaaaaatccacataattccagtcaaaagggaaaattcctgtcttcgcatagtatagtgaatagaagattacatatagttgaatcaaaaagcagaggacatcaaataatctgtaatcccgataagtcggttcatattttgataatagatatgaagcaatgatggtacagaacatgaccaaagagttcttaacatttaacatagcattggaagccaccatgttcacgacatagataaggtaaaagacaagcatcaagccaaaaataatacattcggatgaattaagcttgacctttcttaacaacaggcaaagcgccacgacgagcaaagaatcaaaaatcaacacatagcccatgctgtaatacagcggcgttaccaacagaagtgcgattgaaataagccagatactatatatattaaagtcatattgtttgcccaaactcatcgtcccactcctacaagtattattgtccagtctatctggtctttagtattaatctatcacttatcaaaatcagtcgcacaccagtctatctccatttaagaaactcacccatatgccgatattttttcggtttcataccgtctttgaatttggcaatcttttcagtataaataggctctatgccccccagatccaaatacgatagaccctcctgtaaaaaggtttctgctgcggtatatagaagcagattattcaagcatagagcgcggccctcaacactattccagccaatgtaataagtagcagtgttgatatgctgataaaatatatcaaatgccatgatattgttactttcatccgtgacataaaatactctcaccggaacatcctccagtgtaaacattgtcctgatcaggtgatcctcaacgccatcaaatcgcttgctctcctgatcttgctgataaatctctagcatttcttcatagcgctcactgtctgtccgcacggtaagattacatttgagcgctttcttcagctgatttctccatttgctgtccaaggtgctcatcaattcctcttttgtttttttcaggctcacaatgccggaaggaaaaccaagcctgttccagttgagccagccgtgctgcaccataaacgcatagttttccacattcataaagctaaaaggtacatagaaaaacagtacacatctaaagtcgcttttccggatcatttctatcgcagttacttcgttttctatcgtctgctttccatcaataaacaatgggccatggttgactctggccgcaattttccatgtgccaattgccttaaatagcacctgtactgcaccgatattcacgttgttttccgttatgatgtatcgattgacacgccaatgctgcgccttgtttttcgcctcagcataagtccaatcctgtgtaacgttagtaaatcggcactgacgcaaaacagtctcccaatcttttttatcctcagcaccgtcttgtaagtgcctaacccccatgccctccaagctgtttttctttccagtcgatattttttttgcaagctccgtgatagaaagtgtctgcggaacgggaatgacgattaaatttttagacaactccaacgtttccgatgataatttttctgaacagccctccgaagacaaggaaggccaaaaagatacgtcaaggccgatgcgcttgattcgctcaatagtctccttcggatctgccacatttttcaaggaatatacagcaaaaaatgggcactcattctgttctgtagtcagcatcacaacatcaggatcaatttctgctatgatagcatccacaaaggccctattttcttttctatcgtaggaaatctttttcaattcttcataactatatccgttaaccgttttctgagaccacgaagatatcttttcttgcgtttctctcttgcttttcttttccagtatatgcggctcgtaattaagctctatttttcgagaaatcttaaaaaccttttgggtcgtttttttcaatttccacaccaatgttttgacagtattcttctcgcatccagtcaattttctcttcagtaattcaacaatctgcgataccgtcacattgttttcgttatacttaataattccgccatcaaaaattggcaaaagtttatggggactaaacagtgaaaaatcaccttttttgcctatcttcccatagtcgtacagtacatgagcacagtcttcaattagaattgcttcgtttttgtcacaaaaagaccttgctttacttatgtcaaggcattctccaaaaaaatgcacgtggataaacatatcaataggagattcaatttctttgattgtattccaatcaggttcgaaggtgttagtaactggatagcccaccagatgtagcccatctatcataaaatctgcaattgtttcagcacaaaaaaactctggcaaccaaagataaacctctctcttgtttttcactatttgatatgattcaaaaatcaaccgcatagagacacttgttctggatgaccaaagcacatttctccaatatccatcttgctttggcctgttaatcccgaatagttgtttccatgtaggtgtaagtgcgctgcaaattttctttctattaatcttaaaatcaggcgtattatatgttttccccatcggatatctcctcatattcttccgacaatgtttttatatcaacacacgaaagacctagtgattcaaaataatatgactaaatagacattgtttcgattgcacttacatgcttttccattttcgcatatacttcaaaaatgaactgatcattattttagatgtttttccgctcttattttcacgtttccactcatgctctacagaaatttgcggaacgaacatcgctttaccaaattgttttacccttctcgtcaagtcaaaatcttcaaaatacataaagaagagctcatcaaagcctttgcattttttgagcgcatccatcctaaaaaacataaagcaacccgtgcatacatcaacctcgacgggttctgaaatcacttcatttgcacgagtatactcgcttctccatttcctgaatatctctccatgttcttccagttttccagctaaaacatacttaaaactaggatgccttttaggcaaaaattgctcactaccatcactattaagaatcttcggcgaaaggagtacgacatctttatgttcttccatatagtcatacatttttcttaacacatcattttgaaattttatatctggattaataaccacatgataatccgagtcgaccatattaatcgcaatattgtgacctccaccatatcccagatttttttcagatggtagcacaacaacattagggtagttttgtcttatatacgaaaccgtatcatcagtagaagcattatcaaccacatagaccgtcaaatccactgacacgctgctcataagtgattctaagacaccagtaatctcgtttctactattgtatgttacaacgctagctgttattttcattatctttctaccctctcaatactctccattaacccacaaactctgtaattctctttatactcactaatcctcatgtcgtagctcatgctaccgaaagccttatccacaagacccgtaaccttacttagtatcttcaatgcccaagcaaagcctttaacagccaagacttttttcttgtgaacctcggcaatcattttcaccaactctgcagtattggtatactcgccgttctgtggacagaaaacgccatgttcctcgttctcaaccatcaagcgaacaaactcacataggttttcaacatacagcatggagcgttcattttttacatagggaaaaataggcagctttgttgcaaatttactaagtacagtataattccccttacaacctttaccatatatcatcggtggtcgaagcactactacattgaaaccttcaccctgcaacggcaatatagcattttccgcttgcaatttgctgtcaccataaaagttggctggagatggcatagtagctttcgtaatcactttggatttaccgatcggggcactgtcaccataaacaatcgcgctgctcataaaaatgaactgctttacaccatctgctttcgcctttttcgcagtttcaaatgtaagatctctattgattttatagtaaaattctttgcgctcttccgacacatgacctgtatccgagtgcgcaatccccgccacgtggaacactgtgtcatatcccgagaagtctttctcccgccaggtaccgtcgatcatatcgacagtatctacctgatacttttccggccactgggccatgtacttctcaaaagaagtcccaatatagctgttcgcaccggtaatcaatatctttttcattccgaaacctcttgctcctgaaccgactttttcatttcgccggttccgccttccactacgccgtcgctctttaaaaccttgccgatcgttccaaagaagcatttgcagtcaaaaaggaaggactgtttctccacgtattcaccatcaagcttcgctttgatcggaatttcaagttcatcgcggccattgatctgcgcccagcctgtaaggccaggcttaacaccatttacaccgtatttgtctcgctcggcaatcaaatcatcctgattccaaagcgcagggcgcgggccaatgatgctcatatcccctttgaggatattgaaaagctgcggcagttcatccagactcagttttcgaagcgtttttccgcacttcaacaaatactgttcgggattctccagctggtgcgtcggaacatcgtgcggtgtcgacattttcatagagcggaattttaaaagcatgaagtatttcttgttcttcccgatgcgcttctgcctaaacagcgccggtcctggatcttcgtgcttgatggccgcagctataatcagcattggaatacccagcacaatgatcccgataaaggacagcacgatgtctataaggcgtttgaaaaaatgtgtatacatgattgcaatccactctctcaatctcacaaactatttgccggtatgccgacgattttacgacgcactctcttttctcttatacgtcggtacgatctccgccacaatatccttcatgttgtccgcttcggtcttgtaggccgcttccaaccgcttgagctgttccttgaacttctcgtcgtccatttcgatcggcttgccgatatggatcagcttgttctccgtatcctgcaatccttcttcttccatcaaaagctcctcatagagcttttcgccggggcgcaggccggtataaacaaccgcgatgtcgacatccggctcaaaaccggacaggcggatcaggtcgcgggccattgaatcgatcttcaccggctcgcccatatcaagcacaaagatctcgccgcccttcgcgtaatagcccgcctgcaaaacgagcgaaactgcctcggggatcgtcataaagaagcgcgttatatccgggtgcgtgaccgtcacgggtccgccctgcgcaatctgcttttcaaacaacggaatcacactgccgttgctgccaagcacattgccgaagcggactgcgacaaactccgtatccgattcgcggttcatcatctgcacgaccatctcgcacagacgcttggaagcgcccatgatattggtcggattgaccgccttatccgtagagatcagaacaaatttcttcacgccatacttgacagcagcctgcgccatcttatatgtaccgaacacattgttcttgatcgcctcgttcgggctgtcctccatcaggggcacgtgcttgtgcgccgccgcatggaacacgatttcaggccggtacttgccgagtaccacatcgaggcgcgccgtattgcgcaccgaaccgatcaaaacgacaaggtccaacgccggatatttccgcttgagctccatctggatgtcatacgcattgttttcataaatatcaaaaatcagaagctgcttcggattgctcttcgcaatctgccggcacagctcgctgccgatcgatccgccgccgcccgtcaccatgatgaccttgccggaaatatacttgcggatctcgtcgatgttgatgcggatcggctcccggccgagcaggtcctgaatctccaccttcttcagcttgctgacactgacgtcttcgttgatcagctggtacatacccggaattgtctgcacctcgcacttcgtcgtgctgcagatctggaggatctcctttcgaaccttcgcgctgccactcgggatcgcatagatgattttgttgacatcatacttcttgaccatttccggaatgtcataccggttgccgacaatgcgcacgccgctaagcattttccggaacttcgaagagttgtcgtcgatcaggcagacgacacggcccgaaaggaactggctgtgcgcaaattcgcggatcagcattctgcccgcttcgccggcgccgatgatcatgatccggtcgatcttctgctcgcccgtgccgcgctcaaagaccaccttcatccggcggataaagcggtacgaaaaccgcagcgctgtcgtgctcaggaaactcagcagaaagccgataaaatagtagctgcgcggcatgtggatgtcaaaaatatggatacagaaaaagccgatgacaaagaggcacgcgtgtgccaaaatcatcctaaaaagttcgttttcactgacaaagctccacacgctgttgtagagctggaacaccgcaaaaaccaaaacggaaatcgcacaccagatgaggatcgtattctgccagcacagaaagtaattgcgcggaattccgctgaagctcagctcaaaacgaaaccacagcgacagaaaaaacgaacaggcgatgcagacaaagtcgagaaaaatgatcagcaaaatacggctgaccagttgtatatccaaatgaaagcttttttttgctgttcataccccaaacccttttttacgacaaaaaaaaaacaattcgcataaattttcagtgtcttaattctcagacgattatagcatatccgacaggaagatgcaacaggtaaaactcgctaatcccccgcatgcaggcgacttgccggcaccacgctggcggcaccggcaagtcgagcctgcaggccttgcagcgcctcctgcaaatccatgcaaaaatattacgcttccgcgaccgcgcagtcgcccggatacgtcattgcgatatacgtcttgccccggttgatctgcacctcgccgccgttttcatcgaaaaatttgagcgggctgtacgcgtccgccttcgaccaagtgatcggctgcgccatgccctcggaaatatagtagccctgataggcgtcgccgccctgccagttcacttttttcaggccggaggccgcgtcgcgcaccgaaatatcggtttccagaacgatcacattcgtgaaggcgagctgttcgccggaaacgccgtccatatgcgggctgtcctgatagttcttcaaataggtctttgtctccgcatcgtaggtgaaggtgctgtagttgctgccgaaatccacgcgcaccgtaccggccgcctcgccctgcggggccgcattttccccctgcgggacaaagctgaacgctgcgccctgatgcgcctcgtcgaggtctgtgcggacgccgttcttttcgagcgcggccggcagcttcgtgccgtagaacatgccggtgtgctccagcgaatagccgctgtcgaggcgcgcctgatcgcggcccatcagcccgtaatgggattccagcgcgtcgatacggtcgttgttcagctccgtcaccgtctcgcgcgcaatcgactcatccatgccccagtgcgcataaatcgcatcgaagccgacagccagcagcgggtaatagtaccggcagctgcgcaccgagcaaatatccggcacctgcgtgtaatcgccgtagagcgccatcaggcgggtcaaatcgtactcgaccgggatctcaaagatcacatcggccgccgaaatgccgtactgcggcagcgccgcctccacgttgttgatcatcactgcgaccgggcgcttgcccgcggcgccttcggtcagcgtcggcagcccggtcagcagattcacgccagcgggctcggcgttcggcgcgggggttggctccgccgtcggttccggctctgcggtggccttcggtgccgctgtcgccgccgcgctggattccggctcgtcctctgccggggaacatccagtcattgccgttacggcgagcagggcggccgcacaaagtgcaagcattctctttttcataggtggttcctccatttccgtgctataaaacatttttattataaacctgttttcagcaaattgcaacaaaaaaactgttcctccgaagagttgacagtaaaacctgaataatcctccgcttttttgtatcttttttcatacacaaagatttgcatccggccgtactgcgcttgaccccagcgcccgcaagacttattctggcactttttccggaatttatcggcgccggccgcgcaggattcttaggcgaacgataaagcagactttttcgttcgtctatgttataatgcttaacaagtcgtttttgccggaaatctgccgaaaaagcgcggatttttgcgcgaacgatattgcctagtttttcctgccgcgccgcacgatatttcctaccttttccagcaattttcttggccgcgccgcgcaaaaccccggttttttgcccccgccccgcagaccggcacagacgtaaaaggggcgcgcatgacattttcgccatacgcgccccttttcgttttattcgtatgcttgggctttactgtaaagcctaaccccttcacagttttgccgcgcccgaaaatcattcctcaaacaggtccttcagcttgccgaaaaagctcttgcgcttctggtagttcttctcgtcggcattctgctcgaattcggccagaagctccttctgccgcttcgtaaggttcttcggcacctccaccgtcacctgcacgtactgatcgccgcggccgcggccgttgaggctctggatgcccttccccttgagcttgaacacatcgccgggctgcgtgccctcgtgcacgtggtactgaaccttgccgtccagcgtaggcaccgtgacgtccgcgccgagcgccgcctgtgtaaaggtgatcggcatttcacaccacacgtcgttgccgcggcgcttgaagatcgcgtgcgggcgcacggaaacgtacacgtgcagatcgccgctcgggccgccgttcgcacctgcgttgcccttgccgccgacattcagaatctggtcgtcgtcgatgccggccgggatcgtgatctcgatcgttttctgccggcgcagccgccccttgccgtcgcaggtcctgcacggcgtctcgatgatcttgccgcggccgccgcagcggtcgcacgtgccgaccgactgcacgacgccgaacggcgtgcgctggttgatgcgcacctgaccgcttccgccgcagttcgggcagcttttcgggcttgtgcccttctgtgcgccggagccgccgcagtccgggcagctctcgatctggtggtacgtcacctttttcttgcagcccttcgccgcctcctcaaaggagacgacgacgttcgcttccacatcggtgccgcggcgcggcgcgttcgggtttgcccgccgcgcggagccgccgaagccgccgccgaaaaagctgtcgaaaatatcgctgaaatcaaagccgcccgcgccgccggcatacgggtttccgccgcctgcgccgccgccgaaattcgggtccacacccgcaaagccgaactgatcgtaccgcgcgcgcttatccttgtcggaaagcacctcgtacgcctcgttgacctccttaaacttcgtctcggccgccttgtcgccggggtttaagtcggggtggtactgcttcgcgagcttgcggtatgccttcttgatctcgtcgtccgcagcgcccttctgcacaccgagcacctcgtaataatctcttttgttgtccgccatccgctgtcatctcctcgcaaactccaaaagggcaaggggtatgcctttacacaaaccccttgcgcttcggatcgttatctgaattactcgacgtccttgtagtctgcgtcgtagacatcgccgttcgcgccgccctgctcgccgccggcctgcgggcctgcgcccggcgcaccgccgtacggcggctgctgatcctgcggtgcggacgccttatacagcttctcgctgaccgcgtacatcgccttctggagatcgtccatgccggctttgatcgtctccgtcgtgccggactgaatcgcgcttctgagcgccgcggacttgctgttcagctcgttcttgtcggcctcgtcgagcttgtcgccgttgtcgctgatgagcttgtcggccgaatagcacatgttctcggcgttgttcttcatctcgacctcctcgcggcgcttcttatcctcctccgcgaactgctccgcagccttgaccgccttgtcgatgtcctccttgctcatgttggaggaggagctgatcgtgatgtgctgctccttgccggtgccgagatccttcgcggagacgttcacgatgccgttcgcatcgatgtcgaacgtgacctcgatctgggggatgccgcgcggggccggggcgatgccgtcgagcttgaagaggccgagctgcttgttgtcgcgggcaaactcgcgctcgccctgcagcacgttgacctcaacctgcgtctggccgtcggccgccgtggagaagatctggctcttcttcgtcgggatcgtcgtgttgcgctcgataatcttcgtcataacgccgcccatcgtctcaacgccgagggaaagcggggtaacgtcgagcagcaggaggccctgcacctcgccgccgagcacgccggcctgcagcgcggcgccgatcgcgacgcactcatccgggttgatgcccttgaacggctccttgccgatgagctttttaacagcttcctgcacagccgggattctcgaggagccgccgaccatgagaaccttgttgatctcattgatggagagaccggaatcgctcagcgcctgacgcaccgggcccatcgtctgctcgacgaggtcggccgtcagctcgttgaatttcgctctcgaaagcgtgaggtcgaggtgcttcgggccggtcgcgtccgccgtgatgaacggcaggttgatcgacgcgctcgtcatgccggaaagctcgatcttcgccttctccgccgcctccttgatgcgctgcatggccatcttgtcgcccgagaggtcgatgccgtcggaaaccttgaagctgccgacgatccagtccataacgcgcttgtcgaagtcgtcgccgccgaggcggttgttgccggccgtggcgagaacctcctgcacgccgtcgcccatctcgatgatcgagacgtcgaacgtgccgccgccgaggtcgtagaccatgatcttctggtcgtcttccttatcgatgccgtaggacagcgccgccgccgtcggctcgttgataatgcgctttacgtcgaggcccgcgatcttgcccgcgtccttcgtcgcctgacgctgcgcgtcggtgaagtatgccggaaccgtgatgaccgcgctcgtgaccggctcgccgaggtacgcctccgcgtccgccttgagcttctggagcgtcattgcggagatctcctgcggggtgtagtgcttgccgtcgatcgtcaccttgtggtcggtgcccatttcgcgcttaatggaggaaatcgttctgtccgggttcgtgatcgcctgacgctttgccacctgaccaaccatgcgctcgcccgtcttggagaaggcgacgacagacggcgtcgttctcgcgccctccgcgttagcgatgacgaccggctcgccgccctcgatcacggcgacgcacgagtttgtagtaccgaggtcaataccaattgtctttgccataataattaccgtccttttaataaagaatacttgatttcaaatgataatataaaccgctgcccgccggcttcccggcgtacagtgcgaatttgccgaaccggtgcggatcagtttgcaacctgcaccatcgcgtggcgcacgaccttgtcgccgagcttgtagcccttctggaacaccgccgcgatcacgttttcgccgaggctctcgtcctcaatgtgcgacaccgcgttgtggaaattcgggtcgaacgattcgccgaccgcgccgatctccgcgataccgagcttctcgaagcacgccttgaactggttcgcgatcatctcgacgcccttgcgcatatcctccgcggaggcattctcctgcgcgagcgcgcggtcgatgttgtcggccaccggcagaatcgcgttgaccgcatcggaaatcgcgttgttgtacacgccgcttttctcgttctgcgagcgcttgcggaagttgtcgtattcggcgagcacgcgcaggtgctgctgcttgtggctgtcgaactccgcctgcaggcggtcgtaatccgccttcgggatcttctccgccttttccttcttcttctttttatcctcagcctttgcggccggctcggtctgcttctctgtctcctcttcgggacaggcctttgtttcctctgccataaataacgcccctttctattcttcccgcagaacccgcgtgagcatctcgccgacgcgctctgcgatgtatgcggtctgtgccgccgtgcgcgcgtaacgcatgcgcagcgggccgatgaccgccaccgcgccggcgtccgcgccgttcacgctgtaccgcgccgagacgaccgcggccgccgccagcgcattgtgtccgttttcctgcccgatgcggatctgcacgcggcccggcctgcccgaaagcagcagcgccgcagcctcgtcctgccgttcgatgaaatccatcacgcggcgcgcgccgccgggcccgagctccgggtaaaagagcaggttcatctgcccgctcacgtgcatctcggccttcacggtttcctgcgccgtttccaagagcgccagcaatgccggcgacatcaggagcgcgaggtcgttgaacgaaaccgcaaggctctggatgaacgcccggttgaccgccgtgacgagccgccccacgacgcgctcgttcagcacgcggaagaagatgcgcatgatctcgtttgataggtcgaagtcacagtggaacaccttcgttttcatcgtgcccgcgctgctgatcaggatcagcatggctgtgcgccggctggtctgcacgaactgcacggccttgattttcgccgaaacgccgctcggcgcgctcgctaccgcgagacagcgcgtcacagaggccagcgtgtgcgccgcgccgccgggcagccgctccgggtcgaacgcgctctttgcgagcatcgcgtcgagcgttaggcggtcgttgtccgagagcggctccgccggcatcagattatcgacgtattcgcgcagcccccgctccgaggggatccgccccgccgaggtgtgcggctgctcgagaagccccagctccgcgagctccgccatctcgttgcgcaccgtggccggagaggccccggccgcctcagcgatcgatttcgagccgaccggcccgcccgtgcggatgtatccgtttacaatcgaggcaagtatattctgtttcctgtttgtcagctccatacctgtacctctttcagttttagcactctatcttctcgagtgctaacccttgtctatactatactgcaatggtcaggaaatgtcaacaccaaattttgtaaatactttgtgaaccgcaggagactccgcccctgtgccgcgccctccttatgagccgagataaaaaacgccgaatctgctgtgtacagattcggcgtttgagcggatcacggtcgctccatatcgattcggattctgttttatactgcgcgcccggcactttgatttggaccacaccgcaaaggccaagcgcgttttatgtatcggacgcgtacaggtccgcgagaatggccagccagcggccggcgggcgtgagccaaacctccttgtaggtggcgttgtttccggcgggccagtaggggacgtcctcgtcctccagcgtctcgatacccacgggcatttcgccggtcatctcgccggggaagtgcgcgtactgctggctgtagcggtgcccctcgccgtagatcagcgactggcagaacgggttcttgcccgatacccagtagagctgctcccgggcgatgtccaagagcgctgtgtccccgaaatagcggcccagaatggaagcggatttgcccatagccagatggacggcgccgtttccgcggaacgagaaccatacggggaacatccggatgcagtacccgttcccgagcggaacgcccgcctcgagctgctttttgtagtgcgggcgctgctcgtcgaaatccacctgcaagtgcagcagcgggaaggtctcgcggtcctccagctcgctttcgcagtagatgccggcgggcagcatgccatagggcgcggccctgtcgaacagtgccttcagatattcgccgtgccgccgcatcgccgcctcccagcacgggcggtccgggcagccgggcatcgcccggcaggccgcctcaagcgcctgcacgaaggaatggtcgcgcgactggtgcgtgaagtgcacaatctccctgtgccgctcgtcgcggtagaagaacccggccatcggcacgccgtgcgcgccggtttcctgacaggccacgagcttttccgcatagcgccgcgcgatttcggaaaactccgcctcgccgcacagctcgtaaacagccgaggcgcaccagcaggccgccgcataatactgcgaggggccggaattcatcgtgtgctcccacatgacggggatctccatgcccttttccctgtagcgcgcctccgcccagcgcaggtcctcctttgcggcgtcgaggcacttccacgcgaggtcggggtcgtagtcccgcagcgcccgggcggcccgcgcctcgatcgcaccgcagatgaagttctggtaggcgtgcttgtgcacgcgcacgggcacgtcgtccccgttgccgatgcggccgtcggtccactggccgagcccgacgctgctcgcgcgatagccgtcgccaagccgcgttttgagcgtgtgctcgatgccccagagcgcctcctccatcaggcggttgtagagcagcgggtcctcccgcacctgctcggccagctcgaagagcgcctgcgcaacctcggccgtctgcacggtctgctgggacatatctcccgcgtcgtgccagccgccgccgtagggcagaagcgtaccgccgtgccgcgcggtcacatccagatggcagcagccgtgtttgccgggcaccggatagccgcagcgctcgcagaagatgaagttcagcaccttccacgcagcggtctccatgacccgcgggccgatctcaaacagctcggtttcgacgtccccgcagcggaggcggtagaggccgggcttctccgcctcggtgaacgccagcacgccgaagcggccccgggcgtcctcggcgatctgcacgggcttttccagcaccacagcgccgctttcatccagcagcgcaaagctctgcgcccccgtgtcggtcaccgcgctctttctcccctgcgcgtaatacccagacatggaataggcaatgcgcccgcggcggcaggcccagccgtgctccggctccggctcgtccagcttttgcagggcgatcccgtcgaaatcaaactggaagtacgtccccgccgcggtatccctgccgtcggcgtccatctggaaatagagcttcgtcaccctgtccttcggcaaagaggcgaattcccacagcacatggttccaccgatggttgacgaggttcacaagatgatagccctcccggccgtagcggtccggcacctttttcacaccgtcgttctcgaggtggatgccgaggtgcacggcacggcttccgggcgaatccggcttgacccacagggcgagccgcccccattcgctccaatcctcgccggagacgtcgaaaataagctgcgcgttgtagcgcggccgcttcccctccggcaggtcgtagctgtggatctcatgcgccgtgggcgccgtcacccgcagggcggggccgccgtctctgcccgcctcgggcaaactcatgccgccgatgccgtcatgccgcggcgcataggggccgcccgccgtccacaggggcttttccgccgccaccggcttttgccagagctccgcctccagcgaacgctcctcgtgcagcggcagcgggcggtggatgtacccgctctccctcaattccttgcgaaaggattccagcatccttccccactcctttctgaatatacgggcaggcggctccaaggccgcgccccgggccgcccgctctcacatgtttttgtctctggccatcgcgagcgcgcccgcaccgaccagcccgacctctccggcgccgaacgtggactgcaccagcgccaccccgtttaagatggactgcttctcgagcacggggcgcagccgctccatgagccacccgctcttgatgatcccgccgcccagaataaaggtgtccggatcggtaaagcgcaccagattgagaatcaggcagctcagcgtctgcaccgcctgttccacaaggcgcacgcagagcgggtcgcccgcctctgccagccggaacagcgcctccacatccacccgcgcgccgcgcgccggcagcggaagccgcgtttccgggtactgcggcgcgagccttctcgcctgatacgtaaagcccatgccggaaaccacgttctcacagcagcccagccggccgcagccgcaggcgtccgcgctgtgcagatccataacggtgtggcccacctcgccggccatgttccgcgcaccgcggatgatgtgcccgccggtgacgaagcccgccgccagcccggttcccacgttcaggtagatgaagtcccggcttttgcgcccccagcccagcagaagctccgccgtggcggcgctgcgcacatcgttgtcgatggcggcgggcacgccgagccgctcctccagcatggccgccagcgggatattgtcccccggcaggtgactcagcgagcaccagacgccgttcttgtggtctgaggtgccgaccagccccacgccggcagccgccggctttccgacaaaccccgcctgccgccggtaatcctcaaggcttcgcaaaagcccctccacggtctcctgctgggtgctgtagccggtggggtaccggcgcgcgcggaggatctccccgctttcgctcagctcgccgatcaggagcttcgtgccgccgagatccatgcccaaatatgtcttttgcatcctgccctccgccgcggctcattccgcaccgtagagcttcatggcctcctgcagacggggctccatgaaggccgcgagctcgtcgccgccgatctgcttgatctggttctggaaatccgcgtagttctgctcgaattcctcgtcgctctcggaaaggataatcttcgcatcgctgttcttgatcagatcctgcagcttgtcatcgatcactttcatatcgccgtcggcgtccttcggttccgcatacacgtaccacgggtcattggtgaagctctcccggatcgcgtcgtaaaccggctgaatctcatccggcagaaccgcgcagcgcccctcggcctccagaatcttcgagccgccgaagtagaagtttgtgttgtagatgtcgctgttcgtgccgtcctcgatagactggttccattcttcgctgaactgcggcaggccgtcctcgtccaaaatatattcggtgccttcgcggccccactggctgagcttctgcccctcctcgctgaacaggtactgcatgaagcggatggattcctccggatgctcgttgctctttgtgataaaggtgccgcaccagcccagctcggaattgacgatcgggtcgtccgaaaggggcatcatctccatcaggtgcacgtcgggatttgaattcaggtcggtaaaggaattgatgctgttctgcgtattctgcacggtggagaaggcgttgccgctgttgaactgcgccttttcctcatcgccggcccacgagaagttatcggcggagaaaaagcccctgcgatacatttcattgcagaagcgcaggtagtccttgtagggctccgtcgccgccgtgatctccacactgccgttgtcatggatcgtgaaccgctgcagcgtgcagccgttccacgtcttgaacgggtccagcgtccacgtatcggtgctgaaattcagcgggatcatatcgggatacgcgtccttaacctgctggtataccgccagcagatcgtccagcgtattgacttccggatttccaagcgcctccagaatatccgcccgatagatcacagaggccaccatcgggacggattttgttttcgcccaatcctcattcgatgcaaagtgcgacagcacgcagtagtaattgtcgtcggaggaaaacgccttggcgttctgctgctggatgctcgtcacgtcccagtccacgccgtattcttcgatcagctcgttatacgagtagcagagcgaggggctggagagcttgtccatcagatcgctcgtaaaaaccaaatcgggcaggtcgccggaggcgatcatcatgccgagctgctgcgaatccatcgccttcgtggggttcagggtcacgccggtggcctttgtgatttcctcggggataatgccggtgtagctttccgtggagtaccacgtgtggttgaggaacacggtcagctccacaggctcggccgcctccccgccgccttcggcgctgccgcccgacgcggcggagccttcaccgccgctctcggcgctgccggagccgccgtccccgcagccggcgagggccgcggcaaacatcgccagaatcaggaacaatgccgcaaaacgtgtactgcgctttttcatgtttgtcatcctctcttgaattgtatgtttttattgtgcagggccgccttcggacggcgccgcgcttacgattttaccgcgcccaccgtcaggcccgtgacgaaataccgctggaagaacgggtacacgcacaggatgggcagaacggagatcatcatcgccgcaagctggatggaaagcgttgtggtcgaactgctcgacgccgccatttgggcgctgacgccgctgaggtttttgctgctgctctggttgatgacggccatcatcaaataggccatcgtccgcaggctcttgtcctgtacgaagaacgcgctttcgtaccagctattccagtgccccaccgaggtgaagatcgccaccgtcgccagcagcggcatcgagatgggcacgatcagcctgaaaaagatcgtcagctctccggcgccgtccagccgggccgattccgcaagctcgccgggtatatcctgaaagaaagaggtcgcgaccagcacgtaaaacaggctcaggcatcccggaatgatgtacaccgcaaaattattgagcaggtgcaggttcttcagcgtcaggtaatacgggatgacgcccccggaaaaatacatggcgaaaatgaataggccgaaatagaatttgcggaagatgagctccttatgcgaaaggccgtaggaaacgatggccgtgaacgtcacggtgaagaaggtgccgatcaccgttcttgaaagcgtgacgaagaacgcgcgcagccaggaatcatccttaaagagggaggtgtaattctccagtgtgaaccgccgcggccaaaaatagatgccgccgctctgtgcgtccagcccctcgttgagcgagagcaccatcgccagataaaaggggtacagcgtggcaaagaccaccgccgccatcacgacgccgatcagaacgtcgatgacaatatcctgtctggatctcttgatcttcatggctctcccctcctttaaaacagcccgttgccggaaatgcgctttgaaatgaaattgctcgtatacaccagcacgacggatatgacggactgaaacatccccaccgccgtggcgtaggaatagcgggcgttgacgaggcccacgcgcataacatacgtctggatgatgtcggaattatcgatgttgcccgcgtttccgagcaggtagcactgctcgaagttcgagccgctcaggccgccgccgagcaggttgccgagcgcgaggatcagcaccaccgtcacggtgcccgcaatgctcgggaacgtgatgtaccgcatcttctgcatgcgggtcgcgccgtccatgtccgccgcctcgtacagcgtcgggtcgatgccggtgatcgccgcgaggaagatgatcgtccaccagccggtgtccttccagatcgccgtgataaccgcgagcccgtagaagtagtccgggcttgtgaggatctccagcggcttttcgatccagcccgcgcctgcaaggagattattcagcgcgcccgtgctcgagacgaacacctgcagcagccccgcgaccacgacccacgagatgaaatagggcagatagctcgaggtctgaatgaatttcttcatccgcttgccgcggacctcgttgagcatgatcgcgaacacgatagggatcggaaacgtgcacacgagctttaaaatgcttaaaaccagcgtattgctgagaatctgtgtgaatttgtaatcggtgaagaactcctcaaaccacttgaagccgacccacgggctttcaaaaatgccctgcgtcacctgatagtccttgaagcccatcacaaggccgaacatcgggatataattgaaaacgataatatacgcgacccccgccaaaacaaacgcctgcagggcccgctgcttccagaatctggatagcaagctcttatttttcatgctgtcacctgtctttctccggcatgccgccgcacttctatccggtgagggtctcatggatccacccgccctttctgagccgccattcgctcgtcgcggccttgatgaccttctcggcgcgcagcagcgcgaacaccgccgccggcggaaggcccagccacaggccacagataaagccgagcggcaccgtaagcccccagaggaacaccatgtcgttcaccatcgcaaaccgcacgtcgcccccgccgcgcagcagccccatcatgttggtaatctgcagcgcctgaaagggctgtatggccgccgtgatccacgtgaactgccgggcatagacgagcgtatcgctgccgacctgatagaaccgcagcaccagcgggtaggtcagccagatcaaaagcccggccgccgcgcccatgccgagggcgaggcgctggaagtattttttaagctgcggaagcgcctccagctcgccggcgccgatcttgttccccacgatcacgcaggccgccgcggtcacgccgcggatgagcaccgtcgcgagctggttcatcacgccgcagatgctgttcgccgccaccacctgcgtgcccattctgcccagcaccaccgcaagggcggattcgccgagcgaccagaaaaattcattcgcaatcaccggcgcactggtgcggaagtatatccgcgccagcgggcggtccagccggagcagcgcgcgaaggcggatctgcatgcggtcctcccgcttccagataaaccacaaaatcagcgccgcctcacagatgcgggccagcagcgtagcggtcgccgcgccctcgatgccgagccgaggcgcacccagcttgccgaagatcaaaagccagttgccggcgacgttgacccccatggacaaaagagagcccgccatcgcaatcttcaccgtgtgcaccgcgcgcagggcgccggtcgtagcggcggaaaacccgtaaaaaagatacgatacggagacgatgcgcagatagcccgccccctgctcgacgacctccgcgtccctcgagaaaacagagagcacggggcccggcgccgcaaaggccagcgctgtcaccgcaaggacgaacaggagcgtcacgcggtacatatacgccagaatgccgtgcatccggccgcggtcccccttgccccacgcctgcgcgagcagcacgttggcgccgtctgcgattccgcccaccgccagcgagacgatgaagaacacctgatttgcgagggctgaggcggaaagctccacctcgccgagctgccccagcatcacggtatccgccatattcaccgaaaagctcacgaggctctgcagggcgatcggcacggcgatcgagagcgtcagcgccgaaagcggctttgcctcagcccgcatggttttccgcgtgggtggtgaaatagctgttcatcacccggttgtcgtggggggccgtcagatcgcgcccctcgtcgagcgccagcttataggtgatcacctgcgccgcgcaggccagctctaggcagctgaacacgccgccccgcagctcgagcttcaaatccttttccccgcggaccgaagcgccgaccgcccagccgtttccccagacctcgtccatgtagccggtcagagagagcgccttcgcgtcgtccgcgccgccgtccgtgaaggcgatcacgcagtggttctggtcgtagccgaagttcgggccgtgcagcccctcctccagctcgtagccgattgagatgaatttcggcgtctcccaagccttcacggcggcctccagcgccacgccgcagagcgcgccggcgccggtgaacacaaggcaggccgagcgcatcatgcgccactggcttttttcctgcatccagcgaagcgtctgctccgggatcgggcgcagccccgccggcacggccgccgcctgcgcgagatacgcggcataggcctcgggccccagcgcgccgcgcctgcggcccagctccagtcccagcagcatcagcgtgaacaccgtcgtgctgtagccgatggtgcgcatcgggtattcctcctcgccgcagcccatatccagaaaacacgccgcttcccgtgcggcgggcgtttcagccgattcgctcaccgctgcatggagcagcccctcccgctgggcaagcgcctgcgccgcacgggtcagccgcgaggtgccggtctgcgagatgaagaggtacagcgccttcttccggtgcacccgccccgggcggcagaattcgctcgggacgacggcgcgcgtctcaagcccggaggcctcctccatgaaataggcggcggtctgtgccgaggtggccgaggttcccgaccccacgagcacgatctggtcgagctccgccagccggccgccgagatagtcaaacactggcgcctgaagtaccgcccggttttccagtatccattcaaggcggctcggtatgcgcttgatacaatccaataatgtgaccatgttttttccctcctgtaattagatggtgtaagcgcgcagggcgtgcagcggcgcggccggccccgggcaggtccgcggcccacggccttgcggcgcggtgaacgagcggctccccctttcacggcgcccggcggtctccggataggacagcgcgggacaccggggcctaaaactccgcccgcggcagaccgggctgcccggcgccgcaccggaaaggatgcgcccgcacagcgataagatcatttcgtgtgcatcggtccgccgcccttcttcgtccgtctaaacaatatcacacttcctgcgcgcaggaaactgtccaaagtttataacactgtccacttttacgatcgtttgtcgttgaaagccaccttttatcacaacatccgccttatttttagttaaaaacaacggccgcgtgaaaaatctcgcgcttttctgttgtgccgcaggactttttgcagtataatcgaggaaaagccaaaaatatagctaaaaaacatttattttcagaaatatattggatgttttacacatccaacccaaaaactatgtgaggagggaaagcgcttggaacgacagggacgcggccgggggctgatccgccggtttatggatttctcactggcaaaaaagatgctgttcctctatctgctcatcgtactctttccggtcgtcaccttcaccaccttttatctcggcagcatggtggaagagctgaatgcccagtatcgggaaagccgtgaatcgctcctgcatcaggccgcgcagtcgatccggaacaacctctcgcagatcgagttttgcagcagctctttgcaggcgagcagcgccgtgcgggaatatgtggaggacaaggacctctccgacggcgacggcgtctacctgtacctcaccggcgtgcagtccaccttcgagcagctccgcggcagcaacccgtttctcgagagcatccgcgtgtaccgcgccgccccgcgggagatgaacgacccctacaacgtcctcaaccgggcggattcgccctatctctccgcgctcgagcgcccgctcaacgcgaccggcctcacgctgatgctcgacctcgccggggcggaaagccgctgcgtcgtcctcaagcacctgtacagcgacaagtattaccgccagatcggcaccacggagatcgtatgcgatgcggattaccttctctccccgctgcatttcgtggaggacggcgagtacctcctcctccggctcggggattccgcctaccgcgtggcgcatgcggcggacggggagcggctatccataaccgccttttccggcgagccgcagggctgcccgaacacggcggaggccgcgctcgaggaggtcggcgcccagatcgcctactggtacccggacattcacgtgtccttccaccagtccttctggatgacactggccatcgtggcggccatcctcgcctttttcagccttatctactacttcgtctatctctccatcacaaagcgcatcaccggcctgacgcaccatatcatcgtcatgtcccccgaagcgcccgcgccgtaccgcaaggggcagcccctgtatcgggatgagatcggcgagctcacctaccatttcaacgagatggtggagcggatcgactttctcatcaaccagagctaccggcaggaaaagctggtgcagcaggcgcagtattacgcgatggaatcacagatcacgccccattttctttacaacacgctcgaaagcatcaacatgctcatccagctcgaggaatacagccgggccaccgaaatgctcctgctgttcagcaagttcctgcggtacaacgtctcttggaaaacggaggagacggccctgaaaaacgagctcgaccatatccgggattacctaaagctctacgcctgccgcatgggcgagcggctgcaataccggctggagatcgccgaggactgcgccgaagcgcggtgcccctatttcatgcttcagccccttgtggaaaactgcttcaagcacggctttcaaaacagcgtgggcgcgctctccctcgtcatccgggtattcccctcgggcggcgacgcgctcatccagattgaggacaatggtcagggcatgccggaggcagagcggctcgcgctcaaccgcgcgcttgccgagggcgaggatgcgccgggcgcggtgcgcgtcgggctgcacaacgtcaacagccgtatccggctgcttttcggaaagcactgcggggtgacggttctgcgggcggaggcgggctgctgcgtgcagatccgcatcccccggaaaagcaacacggattctcattaaaaggaggcggcgccatgcgcgtattggtcgtagacgacgagcagctcattctgctcgggatcaaaaagatattggaaaaaaccgaggccgtgcactgcgaggtgcagacggcctccaacgccgcggccgcgctggaggcgttggagcatttcgcggccgacctgctgatcaccgacatctccatgccgcggatgaacgggctggagctcgtgcgcgaggtgaagcaccgggacctctgccgccagtttctgatcctctccggcttcagcgagttcgaatacgcccagcaggccctgcgggccggcgtcgcggattaccttttgaagcccgtgaacccggaggaactgcggcaggccgtcgtcgaggccgcccaccgtgccgggcagcagggcgagctcgactacctgcgggcctatgcgccctatttctcccatgccgacagcgaggccgtgccctatccgctgcaaaagctggtcgcctacatccgcagccactaccgcgaagccgtctccctcgccgcgctctccgagctttccggctggagcgaaggctatatctgcagccagttcaaaaaggagtggggcatcggctacatggatctggtcaatgaactgcggctcaaggaaagcctctacctcctgctttaccgggacgacctgaccgtgaaggagatcgccggacaggtggggtatctgacggagcgccagctcttccgcctgttcaaaaaaacgctttccatgacgcccctgcaaatccgcgatcaggcgcattcgggcggctgaaacaccgcgcccggcgcacactgcaatcgtgcgttcctgcaaaaaaacggcagccccggcaaaaccggggccgttccgatataaaaaagccggccccgccgaagcagagccagctttttgttttcttgggttttcgcgctgcggcggcccgcaggaaccgggaaattccgggcggtcccgccgcggcgctttaccgcctgcccttttcgcagcgcatgcagtcgccggtgcagccgctgcacccgccggtgcgtccccggcgcacggcgcgcagcgcgagggctgcggcgatcagcacgagcgccaaaacgaccgccgtgcccggcgtcatcacgccgcccccagcagcacgccgaagagctgcacggcgccggccgccagccacgcgacggcgcactgcccgagcgcgacgcccagcgcccagccgccgccgagctcgcgcttgacggccgcgaccgcggcgacgcacggcgtatacagcaggcagaacacgagcaggctcatcgcggaaagcggcgtgagcagcgcggtgagcgccgccgtggagccgaagagtaccgaaagcgtggagacgacgctctccttcgccataaatccggtgatcagcgcggtggaaatgcgccagtcgccgaagccgagcggcgcaaagaccggcgcgatccagccggccacgaccgcgaggatgctgtcctttgaatcggcgacgatgttgaggcgcaggtcaaaggtctgcaaaaaccagatcacgattgtcgcgatgaagatcaccgtgaacgcacgctgcaaaaagtccttcgccttgtcccagagcaagcggcccacgtttttcgcgccgggcatgcggtaattcggcagctccatcacaaagggcaccgcctcgccgcggaacgccgtgccgcgcagcaaaagcgccacgaggatgccggcgaggataccggcaaagtacagcccgatcatcacgagcgccgcgtgccgagggaaaaacgcctcggcaaaaaacgcgtagatcggcagcttcgccgagcagctcatgaacggcgtcaaaaggatcgtcatcttgcggtcgcgctcggagggcagcgtgcggctcgccataacgcccggcaccgtgcagccgaagccgatcagcatcggcacgacgctgcggccggaaagaccgatcttccgcagcagcttatccatcacaaacgcgacgcgcgccatgtagccgctgtcctcaagcatcgagaggaagaaaaacagcgtgacgatgatcggcaggaagccgagaacgctgccgacaccgttgaaaatgccgtcgatcacaagcgaatgcagcacggggttcacgccgccggccgccatcgcgtaatcggcgaggtcggtcagccagccgatgccccaatcgagcaggtcggccagaaacgcgccgaccacgttgaaggtcagccagaacacgagcgccataatcgcggcgaatgccggcagggccgtgtattttccggtcaaaatgcggtcgatgcgcatgctgcgcgcgtgctcgcggctctcgcgcggcttcacgaccgtcgcggcgcagaccttctgaataaagctgaaccgcatgtcggcgatcgcggccgcgcggtcaagcccgcgctccttctccatctggcagatgatgtgctcgagcgtctccttctcgttctggtccagcccgaggcgctcgagcacaaggctgtccccctccgcaagcttgctcgccgcaaagcgcaccggaatgccggccttcgccgcgtggtcctcgatcaggctcataatcgcgtgcaggcagcggtgcaccgcgccgccctgctcgtccgcatcgcagaaatccatgcggccggggctctcctgatgcttcgccacgtgcaccgcgtggtcgatcagctcggcgatgccctcgtttttcgcggcggagatcggcaccaccgggataccgagcatcgcctccatctcgttgacgcgcaccgagccgccgttttcgcgcacctcgtccatcatgttgagcgcgagcaccatcggcacatccagttccatgagctgcatcgtcaaatacaggttgcgctcaatattcgtcgcatcgacgatattgatgatccccttcgggtgctcctcgagcacaaagcgccgtgtgacgagctcctcgctcgaatacggcgacatcgagtagatgcccggcaggtcagtgacgagtgtgttctcgtgtccgcggatcgcgccgtccttgcggtcgaccgtgacgcccgggaagttgccgacgtgctggttcgcgccggtaagctggttgaaaagcgtcgtcttgccgcagttctggttgcccgcgagcgcgaagctcagcgtcacgctgcccggcagcggcggccggccggtctgcacgtggtaccgcccgccctcgccgaggccggggtgcgagatcggcttctcgccgccgcggcgcctgctttccggcgccgcgtcccgcacgcgcacgattttaattttttccgcatcggccagccgcagcgtcagctcgtacccgtggatgcgcacctcaagcgggtcgcccatcggggcgaatttcaccatcgtgacgtccgcgcccgggatcagccccatatcgagaaaatgctggcgcagcgcgccctcgccgccgacggtctgcaccgtggcggtttttccggccggaagctccttcaaggtcatttgttttccccctcatacccctgcgcgccaaaacgcacagcccttttatatcgctcaaatgttagtctaaactaatattttgaatttgtcaaggggaacaccaccgttttccggccgcattgcaggctcaggccgacatacgcctcccgcatacttctgccatacaaaacaaagacaaagcgcgccgaactctcacattcggcgcgctttgtctgaaaagctggtgggccatcagggactcgaaccccggaccgaccggttatgagccggctgctctgaccaactgagctaatggcccgcatctgcggccgccttggcggccgagaaatatcatagcataattcgcgcaaaaaagcaagaaaaaattgccgcctgcacgctcagctgtctgcgtcctccccgcggctctcctgcgtcatcgcggcggagcgctcggccgaaaagccctcggtcgattcgggcacgaacaggatcttgatggtcagcagcagcagcttcagatcgagcatcaaagactgcttttcgatgtactgcaaatcgaggcgcagcttgtcgtaggggccggtgttgtacttgccgtagatctgcgcgtagccggtcaggccgcccttcacacgcagccggtaggcaaattccgggatcttcttcgtgtaggcctccacgtgctcgacgcgctcgggccgcgggccgacgagcgccatatcgcccttgaggacgttgaggatctgcggcagctcgtcgatgcgcagcttgcggatgatccgcccgacgcgcgtgatgcgcgggtcgcccgagcggcacgggatcacgctgccgtttcgctcggcgtcgacgaccatgctgcggaacttgatgatctcaaacacgcgcccgtttttcgtgcagcgcttctgcttgaagaacacggggccgcggtcctcgagcttgatcgccgccgaaacggcgagaaaaatcggcgaggtgacgatcagcgcgagcagcgacaccacaatgtccgaaatgcgcttgaagaggttgtaccagaagcgctcgctgtggtactcgtacttcatcagcggcgtgtcgatcaggtggcgcgcgccgaagccctgcatcgtgatctcgtcgagctgcggcgtgatatacaggcttttgcggctctgcatgcagtaccagagcatctccgagcggcgcgagctgctcccgacctcgtagaagatgaccgcgtcatacgggtcgagctgcattttccagtcggtccgcagcgtatcgtacggaacgaccttctccacccaaaggatgtatttgagcttgcgcagcttccggatgaactcgcgcgtatcggcggtgccggtgacgatgagcgttttctccggctttgaaaagagcaacgtcatgcgcttggcaagcagcccccaaagcagcgccgccagaagctggcagccgaccgtcatcagccccggcacgaggttcacataattgtggcggatcatacagaactcgccgtacagcagcaggtccgcgataccgaaggccagaagctgtgaaaataccgtctccaaaatggagtaatctgcgattttgaacgcgcggaacagattgcccagcgcgatataaacgatgatatacaggagcagcgtgactgtaaagcccacgctttccatattggaaaagatcgccggcccataatactggaaaagcacgatcgcaaaaaagccgatctccagcagaacaatggtcaccttactgaccatcgccagcacaaactttttattgttcatatgcgtctacacatcctgcttgacaggttatttttcttattgtacccattttggcggtaaatgtcaacgcatcgcccgcgccgttataaatttcttcacacacgcgctttaatttatacatatcttcccatgcaaaaaggaggagcggcgtaccgctccccctcgttttatttccgcttattccttgtcgcagccgcagtcctcgccgcagccgcagtcgcacgcttcttcctcgtcgtcgaagtcgaactcaaggttttcgccgcagttcgggcactccatcgagccctcctcgagcatctcgccgttgagctggatcgtatcgccgcagctcgggcaggtcacctcgaagtagcactcgtcgtcgtcctcatcgtcccaatcctcgtcctcgaagtcctcgtcgtcgagctcgtagtaagcctcctccagctcgccgagatcctcgtcgatctcgtccacctggccgctcagctcgtcgtacgcgtcctccatctcctcaacggagaggcagaggtcgtcgagcaggtcgacgaccgcgttgaagagcttcgtctcctttgcgttcgggtcgaggtcaaggccctccatcaggccgcggatataagctgctctctcggaatttgtcataatcatttacctttctttccgggtgccggcgggcggcagcccttttcgcaggggctttcgccccgcattcggtttcgggcggcagattatgcgcgctccatgtattcgcctgttctggtatcgatgcggatcatctcgccctcgtcgatgaagagcggaaccttgatctccgcgccggtctccagtgtggccggttttgtggcgttcgtggccgtgttgcccttcacgcccgggtcggtctttgtgacctgaagctcaacgaagttcggcggctccacgccaaagacgcttcccttgtaggaaagcaccttgcagaccatgttctccttgacgaacttgaagttgtcgccgaggttgtccgggccgatcggaatcagctcgtacgtttcgctgtccatgaagtaatagaggtcgccgtcgttgtagctgtactccatgtcctttctctcgataaacgccgtcgggtacttgtcgttcgggttgaacgtcttttccgtcacagcgccgctgatcacattgcggatcttggtgcggacgaacgccgcgcccttgcccggcttgacatgctggaactcgataatggaatatacgttgccgtccatttcaaacgtgacgccgtttctgaaatcgcctgcggtaaccatatgataatacctccaaatgtttcttctctgactattgtataatagattcgcctttttttcaagaagcaatcgcgcaatttcgggaatttctgtgaaattacaggatcataagcgccttgggcgaatgcgtgaggttgcggcagccgtcctcggtgacgacgatcatgtcctcgatacgcacgccgcacttgccggcgatgtagatgcccggctccactgtgatgaccatgcccggctcgcagatcgtgttgtcgcgcgcggaaaagcgcggccattcgtggatctcaaagcccacgccgtggccgaggccgtggccgaacgtgcccgggtacggcgtctcgatgatgtcgcgcgcaaccttatcgacgtcgctgcagcacacgccggcatgcaccgcgtcgatcgcggcaagctgcgccttcagaaccgtgtcgtaaaccgccttctgctcgtcgctcacatagccgagcgccacggtgcgcgtcatgtcggagtggtagccgcgcagcatcgcgccggtatccatcgtgatgaaatcgcccttcttgatgaccgtgtcgcccgggatgccgtggcactgagagccgttgccgccggtgacgacgatcgggtcgaacgcgttgccgtccgcgccgagcttgcgcatgtagaactcgatctcgagcgcgatctcgcgctcggtgacgccctcgcggatgtacggcagaatgtgctcgaacgtcgcgtcggtgatcgcctgcgcgtcgcagatcttgcggatctcctcctcgctcttcacgatgcgctgcgcgcggagcgcgtcgtcgagcgtcgtgtcgagtacagcctcggcgccgttctcggcgcagagcgcctcaaagcgcttggcctgcccgtagggcagcgcggcatactccatgtaaacgcccgtgacgccgtgcttcttgagcagcgccgcgatcgaaccgctgaggttcgtgaattcctcaaccgccgcgccctgcgccttcgcgcgcgccgcctcggcatagcggaaatcgagcaggtagtacgccttttcggcggtgagcagcagcgcgccgtctgtggacgggaacgccgtgagatagtagagattcgtttcggagacgacgagcgccgctttcttcgcgtcgccgccgatgaccttttctgtgagccgctcaatcggagagcgcatagaaatcaccgttctttctgttaaatttcaggccgctgcgttttcagggcctttaaatttcagggctgcggatttttgaatccagccgcttataatgcggccggaggaaatgctcgagccagcgcttgaagcgcaccgtcgcggccgggtcgcgcgcgatgggatccaaaagcaccgagggcatgccgcacaggttcgcgccgagaatatccgtgaaaatctggtcgccaacgacgaggcattcgcgcacgcgcgcgccggaaaggcgcttcgcgcgcaggtagccgaacggcgagggcttgcaggcaaacgagacatacggcagcgaaaactgcgccgcaaacggcgccacgcgctttttgtagttgttcgagacgacgacaaggcgcacgccggccgcggtcatccgcttcgtccactcgagcacgcctgtgtaaggcgtctggtcgccgtgcggcgccatcgtgttgtccacatcgagcacgagggcgcggatgtgcatcgcgccgagcagctcgggggtgatatccgtcacgcggtgcagcgtgccggtcggtttgaatacggccatgctctccaccttgccccttctgcgaaatgtaagccgcgtgccgcgcgaagcggcagaggtcttttcggccccggccgccgcccggaacagccgggcaaaacgcgctttacacaaaaaagcgggccgaaaagcccgcttcttcacgtttcattatttgtacttgcgcttgcgagcggcttcggacttcttcttgcgcttcacggagggcttttcataagcctctctcttgcgcacctcctgaatcacgccagctctggcgcactgcttcttgaagcgtctgagcgcgctctccaaagactcgttgtctttgattcggatttcagccatctatatccctcccatccgccatcaggcaggggtgtatttgttattagcacgaaataacacaaataattatagttgccgaggcaaaaaaagtcaaggcttttttcataaatttgcaagaaaagcgcgcttcgggcaaaagttttcttgtaattcggctctgcgcgcccgcctagcattggcgcgcggcgctccgccgctctgcgccggccgcgcgggcacgcatcgggaaaagacaagaaaatatgatgaaatcccacaaaaaaggcgcggtgcaataccagaatggcaaatatcaaatacacagaattcgaaaaaaaatatgctcaaatcgaagtcgaaagccttgacaaggctcgaaaaacatcataatatataattataaagcaaagagaccattttggaaagtggggtgcacagctatgaaaaaagagacgcttacaaagagcgagcatgaaatcatgaatctgctctggcatgtcgacaggccgctgaccgcttctgaaatcatcgaacaatcgacagacaaaacatggaaggacagttacatccatctgctgattaactctctgctggataagggaatgatccgtgccgaagggtttgcaaaaaccacgaagaattatgcgcgcacctttgtggcggccgtttccgaggaagcctacgccgtccaacagatcgccggtcgaaagccgctcagcacactgtccgtcgtgtccatcgtttccgcgctggtcgagcaggcggaggaaccgtccgcgctgatcgatgcggtcgagcgcatgctcgccgaaaagcgaaaagccataaagtgagcttgaaaggcccgcgccgggaaaacggtgcgggccggaatcttttttcagctgttttcgagcttgtccttgccgacgggccgcgtgaaaagccgctcgaagctctcgcggctgtccgaataggcgagcgcccacatcatctttgcgatcacagcctcggtcgtcatgctcgaggcctccaaaacacggtatttctccttgatgatatgccccacgcggtagaccgagaggttgcttccctcgtgcggcacctgcgtcgtgatcacgacgcgcacgccgttctccatcatcgcggcgatcttttcctcaaaggcgttgtcgccgtagtacgggatgccgccgacgccgaagctctcgatgacgacgccgcggcagttcgcgttgatgtaatcgaaaatcgaggggtccatgcccgggatcacgcgcacggagaggatctccggcacgagccggtcgtaaaagcgcaccgcgccgcattccgggcgctcgtcgatgtagcagaaaagcttgcggtcgaaaaacacgccgatatccgggtagtcgatgctcgagaacgcgtcgaagctcttggaatgcgtcttgcgcgcgcgcgtgccggcgatcacatggctgttgaatacgacgtgcgtgccgcaggcgcggtcgtccgccgcgtaggcgaacgcctcgaacaggtttcgccgcgcgtcgccgtccggcacttcgatcgatttctgcgcgccggtaaagacgatcggcttcaaattcccctgcacgaggtacgacatcgtcgcggcggcgtacgccatcgtatcggtgccgtgcgcgatcacgaagccgtcgtatttttcgtagccgtcgcggatgatctccgcaaggtgcacccactgccgccagcacatgttcgtgctgtcgaggctgtagggctgcacggtgtcgaccgtgcacagcgtgcagatttccggcacggcgctcaaaagctcctccgaagtgagcgcgggcgtcaggccgttctcgctcttcgccgaggcgatcgtgccgccggtcgcgataaacaggatttttttcattgcgggcactcccttatccgcgccggaacggcgctcggtttcgcggccgaaagccgcaagtaaagttttaccacattccgcgcgcaaatgcaagcgcgcgcagaaaaagagccggccgggtctgccccgccggctttctctgttttcggctcactccagaatctcgatctggcacgcgcgcatcgcctcgagcgccgtgcggtggctctccggcgtgacgcccgcgcagcaggccgcgtcgacgatcaccggcacctcgggcagaaacgcctttaaaagcagcgcgttcgaaatcacgcagatgtcggtgcacaggccgacgagcgtgacggattcgacccccgcctcctcgtgcaggctgcgcaggttctcgccgagctccacgctgccgaacgagggcttatcgaccggcgtttcctcgagcagcgccgcgatctccgggtggatcgcccagccggacgtgcacatcacgcagtgcttgaccggcaggtgccggccctcctgcgtcgaaagatagtccgccgtgtgcgtgtcgcgcgtcgcgagcacgaggccgtcaaagttccggatcctttcgacgaccttcggcacgatcgcggcggcctccggcgtgccgagcgcgccgtctataaaatcgttctgcatatccacaacaaccagtacgtgcatatcccttctcctttctccgccttgaaccgcgcccgcagccgtgcggagccgaacgctcccccgctctgcgccgggtccaaagccgctgttctcagatgcgcgaagcgagcgagagcagcgcgtcgcccgtcacgcggtacgtcgtccattcgtcgagcggcgcggcgccgacggccttataaaacgcgatggccggctcgttccagtcgaggcacgcccactcgagccgcccgcagccgcgctgcaccgcgatgcgcgcgagccgctttaaaagcagcttgccgtagcccttgccgcggtattcgggcagcacgaacaggtcctcgagatagatgccggcgcggccgagccacgtcgaaaaattgtggaaaaagagcgcgaagccgaccggcgcttcgccctcgaacgcgagcagcacctcggcccgcttcttctcgaagatccacgtctcaagcagcgcctcgttcgcgatcacctgattctccatgttctcgtaggcggcaagcgcccggatgaagccgagcaccgcgggaatatccccgcgggcggcaaagcgtatgctgaaatcacccatcgttttttccgtcctttcgttttcgtgcgatcaaaataaaccggtgctccgtgttcgggatgtatccgagccgcgcgcagagcgcctcgagcgcctcaagctgcgcggcgcagccgtccgccgaaaagccgggaaacgcctgcgggcgcgccgccgcgtaccgaatgagcgccgccgtatccgcaaagcgtccggttccgtagcactggtccttgaagttgatcgaaaagcccgcgcggagaaagcgctgcacctcgttttcgaggttgaaatccggccgttcacttccgccgccgagcatgcgccgcagccgcaggccgtcgctgccgcccgcctgctcggtaatgaaatagccgccgggttttaagacgcggcgcacctcgtccgccgcatacggcgcgccgccgttcaatacgaggtcgaacgacgcgtccgcatacggcagcgcgccgcccggcccgcacggccgcacggtgacgccgagcggcgcgagctttttttcacacagccgcagcgcttccgcccggctttccgacacgctcgtcaggccgaacgggtggcgcagcgagagcagcaacgcgccgtcgccggggtccatatccagtatacggctttcgggcttcaaaaagtcctgtattttccggcggtagctccacggcagcgcgggcggcgcatagccttccgccgcgccatacgcctgcggccggcgcgcgcggctctccccgcccgtcatgtatttttgtccacctgatgaaaggttttcaggttgcccgtcctgccgtggcggcggtcgagctccgcgcgcacgtcgtcgagctgcacgccctcgttgaccatcagcacggtcaggtggtacagaaggtcgctgatctcgagcacggtttcggcgttgtcgccgttcttcgcggcaatgatgacctcgctgcactcctcgccgcactttttgaggattttatcggtgcccttttcaaacaggtagcacgtgtaagagccctcctgcttctcccccttgcgggcgagcacggtgtcgtagagctgctgcaaaatatccatttttcgtccctctttctcgcttttatacccggcgggcctgcgccggaatttcggaaaaacgcgccgcctccccgcgcggaaaagcggcgtgcctttgttagaaaatctgcttgaagaagcagctgtggctgccggtgtggcacgccgggccggtctgcacaacctgcacgagcagcgtgtcgtcgtcgcagtccgccgcgatgcgcaccaccttctgcacgtggccgctcgtcgcgcccttgttccagagcgtctggcggctgcggctgtaaaaccacgtgtagccggtctcgagcgtcttgatcatcgactcgcggttcatgtatgcaagcatcagtacctcgccggtcgaggcctcctgcacgacggcgggaatcagatcggactttaaaaagtgccgctcgagatggtcctcgatttcctcgcgcaccttcagggtattgcccgaaaggcgctggcaggccgaaacggcggcgcgcaggtcgagcgccttcgtgtagagcgccttgcccgcaattgcgccgtaaagcccgaggttgttgagatccacgatatccttgaggctgctgacgccgccgctcgcgatcacactgcacgaaaccgcgcggttgattttgtcgagcatgacgaggttcggccccgccattgtaccgtccttcgcaatatcggtgacgatcagataccgcacgccgatgtcctccatgcgccgcgccatctccatgtaatccgtctcgctctgggccgtccagccctcggcggccaccttgccgtcgcgcgcgtcgataccaaccgcaattttcttgccccagcgcttcaccgcctcgcgcacaaacgcggggtcgctcagcgccgcggagccgagaatcacgcggttcacgccgcgggagaggtagaactcgacgctctccatatcgcggatgccgccgccgacctcgatgttcagcgtcgtattttcgcggatcgaaaagatcgtcgcgtcgttcacggggcgtctcgcctttgcgccgtcgagatcgacgacgtgcatccagcgcgcgccgtccgcctcaaacgaccgcgccgtctctacggggtctgccgccacctgctccgccgtggcgtagtcgccctgaaacaggcgcacgcagcgcccgtccttcaaatcgattgccggtaaaataatcattttgttcccccagttttatgccgcggcccgcgcgtcgcaccgccggatctcctccgttttgacggagcaaatccgtcctgctggcacggattcgccccgggcagtccgccgctccgccgcgttccctcgcctgtttatccgccgagcgtcccctttgtggagagtgccgcgccggtgctgttttccgccgtcgcgtcgcagagcgcgtgcgcggccgccttgaacagcgcctcgatcatatggtgcgcgtttttgccgtacgggcagcgcaggtgcagcgtgaagcccgcattgtcgctgagcgcgcggaaaaactcctcggtcatgcaggtgtcgaaatcgccgacgcgctcctgcgggaacgccgcgtcgaacgcgagatatggccggccgctcacatccaccgcgcagaagccaagcgcctcgtccattgggatcagcgcgtggccgtaccgctcgatgcccgcgcggtcgccgagcgcctttttaaacgcccgccccaaaacgatgccgacgtcctccacagtgtggtggcagtccacatgccagtcgcccaccgccttgagctgcaggccgaagccgccgtgcacggcgagcgccgtcagcatatggtcgaaaaagccgacgccggtggaaatctccaccgcgccgccgtccagccggagcgtgagctcaatatccgtttcctttgtcgtgcgcgtgaccgccgccatacgttccatttgcaccgtccctttctgcttgcttctctgttacgcctctttctgcgcctcaaaaaaatcccggatgtgggcgagcaccgcggcgttttcgccggtggcccccgccgtgatgcgcagcgcggacatattcttaaagtaccgcaccgcgatggagtccgaaagcagctttttgaaaagcgcctccgcctgcggggtgcgcagcacgacgaaattcgtcacgctcggcacaaccgccatctgccccggaaactgcccggcgatctgctcgagcccggcctgcagctcgtcgcgcgcgagcaaaagccggcgcgtagccgccccgcactcgccgcggctgttcaaaacgacctccgccatgcgctgggaaagcgcgttgacgttgtacggcgatttgaccgccttcacggcgcggatcagtttttcacagccgaccgcgaagcccacgcgcagcgccgccagtccgaacgccttcgagcaggttttgagcaccagcaggttgtcgtattccgcggcctcctgcagcatcgattcctcccagaaatccatgtacgcctcgtcgagcacgacgagcgccgaaacgcccgatatgatccggcgcaccgccgcccggtcgaggccgagcgacgtcgggttgcagggattgctgaaaatcagcagctttacacgctcattgttgcaggtttcgatcaccttgtcaacatctatcgtccaattttcgtttttttcgatcgccacgccgcggcattccgcgatgtagccgtaaaaatcgtacatcgagaaatccggcgcgaccgtcgcgtatgtgtcccccttttggaggaagctctggaaaatgacggagatcagctcgtccgagccgtttcccgccgcgacatgcgccgcatcgacaccgtacgcgcgcgcaaacgccgcgcacagccccttcgccgtcgggtccgggtagcggttcagctcgacggagaacgttgcgtgcagcgcgcccgccatgatcgactccggcaggcgcaggaacgattcgtttgcatccagccggatcttatagttgcccgcgatcggcgcatacggctcgagatcgcggatcttatcgttcagttcatacatggttctgccccggctcccgcttttggaagccttccctttccgtatggattttcccattgcgcaggcgccgccgaaccttccggcggaactggctgcggtcaaagcgcttcgtctcgcaggcgcgtcacggcatgtcccggcgcacggcgatcgaattcgcgtgcgcggtcagctcctcggtctccgcgatgcggatgatgtcgtcggcggccgcgagcagcgcgtccttcgtatagtagatgaagctcgacttcttgatgaaatcgtcgaccgaaagcggcgagaagaagcgcgccgtgccgcttgtgggcagcacgtggttcgggccggcgaagtagtcgccgagcggctcgggcgagtagctcccgagaaaaacggagccggcgttgtcgagctttccgatgtactcgagcgggttctcgcagcagacctcgaggtgctccggcgcgagctcgttcgcaaagtcgacggcctccgtcaggctttcgcagacgatgatcgcgccgaaattatcgatcgactcgcggatgatttcccggcgcgagagcgtctccatctggcgctcgatctcggccgccgtcgcctgtgcgagcgcctcgtcgggcgtgatgaggatcgccgaggccatgcggtcgtgctcggcctggctcatcaggtcggccgcgaggtattcgggccgcgcgctcgagtcggcgatcacgaggatctcgctcgggccggcgatcatatcgatgtcgattgtgccgtaaaggagctttttcgccgtcgcgacgaagatattgcccgggccgacgaccttatcgaccttcggcacgctctcggtgccgtaggcgagcgccgccacggcctgcgcgccgccgatcagaaacacgcggtccacgccggcgatcttcgcagcggccaaaatgttcttatccggcttgccggtgcgacccggcggcgtgaccatcacgatctcgccgacctcggcgatcttcgccggaatcacgttcatcagcacggaggacgggtacgccgccgtaccgcccggcacatagacgccgacgcggtgcaggccgcgcacgcgctggcccatcagcacgccgtttcgctcggggtcgatgcggctctgctgcttctgacgcgcatggaacgcgcggatgttctccgcggcgcgctccatcgcggcgagaaaaccggggtcgcagtcctgcatgatgcgctcgatctcctccatcgagatctcgagcgcatccggcacccagccgtcaaacttttcggaatacgcccgcacggcgcggtcgccgttgtcgcgcacgtcccggaggatcgcggcgacgccgtcctccacgctgcggtcgttctcgcgcacgcggtccttgaggctctggatgaagcgctcgcagtacgcgcggtcgcccttggctatacgaatcatacgtttttctcccctctgtttccggcgatggagcgctcgagctgcgcggcaagcgtttcgatctccgccttgcgcagcttgaggctcgcggtgtttgcgatcaggcgcgccgaaatctgcgtaatggtctccacaacctcgagcccgttctcgcgcagcgtcgcgccggtttccacaatatcgacgatgccgtcggccagcccgagcagcggcgcgagctccaccgagccctcgatcttgatgatgcgcacgtccatcgcgcggctttcaaagaactggcgcgcgatattcgggtacttcgtcgcaacggttttcgcccggtagccactgaaaaaatcaaagccctttttgcaggcgagcgcaaagcggcagcggccgaagccgaggtcgaggatctcgaagaaatggctgccgttttccatgatcgtatccttgccgacgacgccgaggtcgcacacgccgttttccacatacgtgatgacgtccgcggccttcgcgagcacggcctcgatctccccgtttccgacgggcagaatcagccggcggcccttctcgcgcacctgcgtgcagtcgaggccgatccgctcgagggcggcgactgtgtcacgttccagccggcccttcgtgagggcgattctcagcggcttcatgcgtttccctccaatccgatttcgagcacctcgcggatgccgcggcgcgcggcgtagtcccgcgccgcctgcgccgtgtcaaacacagagctttcgcagcgctttcccgcggccgtcagcgcgcggatgcgaagctgggcctgcgcttccgcgccggggtgcgcgtgcacgagcacgtcgggcaccggcaccgcggcgctctccaaaaggcacgaggcgagcgcgtccacatccgctgcaaagccgatggcgggcatcggcgcgtcaaactgcttcaaaaggttgtcgtagcggccgcccatcaaaatggcgtcgccgtaattttcggcgtaggcgctgaacaccacgccggtgtagtagtcgttgcgctggacgaggccgaaatcgaccatcagccggtcgccgagcccgagcgccgaaagcgcgccgtacagcgtgcgcgtgtagttcaaagtctcggaaagcgccggatgcccgacacagaagcgctccgcctcgctgaacacctcctcgccgccgaacaggcgcggcagcttgcggatcgcctcggtgtagagcgagggctcgagcgcgtcgagcatatcgccgagcgccgcgtaattcttcgattcgatcgtcatgcggatgtcctcgcggcggtcgtcggagacgggcagctcgtcggcaagcaggcggaagaaccgcgcgttgccgagctcaaaccggaagcgctccgtgcacgccgaaagcgcatcgaccgccgcggcaatcacctcgatgtcggcccgcagcccggcggcgccgagcagctcgatgccggcctgcatcgattcgtcgctgcgcccggaaaggtccttgcggttgcggtagaccggctggttatagtagaggcgcaccggcttttccacagactgcagccgcgtcgccgtgaggcgggcgatcggcagcgtgaggtcgggccggaaaacgatcaggcggcccttgttgtcggtcgatttgtacatctcctgctgcgggatcgccgcgtcctcggcgccgaacacgtcgtagtattcgatgccgggcgtgatgacctcgttgtacccgcgcatctggaacaccgcctcgagcctgcggctgaccgcgcggcgggcgaggcactcctcaaaaaggatgtccttcgtgccctcgggcgtgattttgttaaagcgcttcatccaagcaccctctctcgaaagaataccgggcgccggcggcgtccgggcgggcggtgcagggatttgccccgcccgtctcgctttatcacaataacgtgatattataataccagatgtgcggccgtctgtcaatccccaaaccgcacgggttcacccggcccgctgaaaaacgacctcccgcagcgctgcgccgcggaacgccgcgtattgcgcagcctcctgctcgagcgactgccgcgccgccgcgtctgcgggctcgaacagcaccatctccacagagagcgccgctttctgctgcttctgccgccacacgcctgcgatgcgcccgccgcagagcaaagcgccggggttcgacaccgtctgccagacgatgcgctgcttctgcacatcgtcgagcagcaccgtgcggtcgcgcaggtcgaggtatgggtcgtgcggaccgagcatgcgccacacgcccgtatcgcacaccgctgtgcgcagcgcgtccagatcggccgcaagcacatgccgcgctttgcctgccgcgcgcaccggcacggtttccgccgccgcactctgccaaaggcgcttggcctgccgctggccgcagccgagccacgcggccagcgcagccggatcagccggcccgtgcgcgtgcagaaacttctgcacaaggcgcttttcggcatcgggcggcgtctcgggtgcgcggcccgtccagcgctgaaacgacgtgaacgtcgggtgcacgccgtcgcgcgcgccgaacaccacgcgcgaataaaacgcgcagggccgcagcaaaaacgagacgaccgcgccgccgaccgtctggcgcgggccgtacatcgagggcgcgcgccacagcggcagcttttccgcgggcagcgccgcttcgacgatttccgcgagcgccgcgtcgagcgcttccttgcgcgccacggtgtgcgtctccagatattccgcggcgtgcagaacgagcggcagcagctcgtcgaacgccatgccgagaaaatcgagcgccgcggcgatcccgcgcgtatagatccacggcgtttcgcccgcggctgcggcgagcggcgcaaggaacacgccgctttcgcttgcgggaaatacgagcggcacaccgcggacgctccacgcctgcaagagccgcttttccgcatacagcgcgctctgcgccgcctgcaaagtgcagccctccacgcggttccacagcgcggtttcccacgcgccgggcggcgaattctgaaagccgcagaccgaggccgccgcctcttccgcgccggccggcagctttcggtcgagatggtgcgcctgcacgcggaacgcacggatgctttccggcgcgatctccgcggccgctgtttcacgcatacctacccctccccgtcccattcagaacagtgtggtctggctgctgtccggcagaccctgcaaagcgccggcgtttttcagcgtttcgatgaccgcgctcgaaaccttggcttggctttgcagctcgtcgaccgagatgaaatccccgccgtccctgcacgcctcccagaggctgtgcgccgcggcctcgccgacgccggagagcgaggaaaacggcaggcggatcttcccctcctcgacgaggaacttcttcgcgtccgatttcttgaggtccaccggcagcagctcgatgccgcgcgccagcatttcgttgatgatctggaacgtggagtacgccgcctcctcctttgcggaggcctgcttctccttgatcttctggtcgatctccttcatgcgccgctgcacggccgccctgccctgcacggccgtcgcgccgtcgaaatcctcgctgcgcaccgtgaagtacgccgcgtagtattcgaccgggcggtgcaccttgtaccagccgaggcggagcgtcgcgatcatgtaggccgcggcgtgcgccttcgggaacatgtacttgatcttgtagcacgattcgatgtaccagtccggcacgtcgtgctccttcatcgcggcgatgtgctcctgcgtgaagagctttttcgcattgccctttcgcgtgatctccatgatcttgaacgccatcttcggctcgaggcccttcaagagcaggtaggtcataatgctgtctcgcgttccgatgaccgtggaaatcgtgcaggtgccgttcttgatcagatcctgcgcattgccgagccagacgtccgtgccgtgcgacaggccggagatctgaaggaggtccgaaaaggttttcggctgcgaatcgatgagcatctgccgcacgaacggcgtgccgcattcgggcagcgagaacgtgccggtcagcgagtcgatgtcctcgggcttcacgccgagcgcctcggtagaggtgaacagcgacatgaccgcggggtcgctcatcgagacctgcatgaccgggatgccggtgtagtcctcgagatagcggtagatcgtcggcacgtcgtgcccgagctcgtcgagcttgcagatcgtgtcgtgaatcgagtggaagtcgaagtgggtcgtgatgttgtcggaattctggtcgttggccgggtgctgcaccgggcagaagtcgtagacctccttgcccttcgggacgacgaccatgccgcccgggtgctggcccgtcgtgcgcttgatgccggtgcaggcgatcgaaaggcgcttttcctccgccttgtgcagcgtgcgcccgcgctcctcggcgtattttttcacgtagccgaacgcggtcttgtccgcgaccgtggcgatcgtgccggccttaaagacgttctcgcggccgaacagcgtctcggtgtagcggtgcgcgccgctctggtactcgccggagaagttgaggtcgatatccggcgtcttgtcgccgtcgaagccgaggaacgtctcgaacgggatcgtgtgcccgtcgcggtcgaggtcgccgccgcagcgcgggcacttcttcgcgggcaggtcgaagcccgagagataggagccgtccgtgatgaactcgctgtacttgcagttcgggcagatgtagtgcggctcgagcgggttgacttccgaaatgccggacatcgtcgcgacgaacgacgagccgacggagccgcgggagccgacgaggtagccgtgggcctcgctgtccgccacgagcttctgcgccgtcatgtacagcacggagaaaccgtgcttgttgatggagccgagctcgcgcgccaagcgcttttcgacgatctccggcagcgggtcgccgtatttctccttcgcgcgcgcccatgtgatcgagttgagctgctcctccgcgccgtcgatgaacgggggaaaaacgccctcgggaatcgggcggatctcctcgatcatatcggcgatcttattcgggttcgtcacgacgacctcgtacgccttttccttgccgagatagtcgaattccttgagcatctcgtccgtcgtgcgcatgtagagcggagcctgctcgtccgcgtcggagaagccctgcccggccatgaggatcgcgcggccggcggcgtccttcgggtccttgaagtgcacgtcgcccgtcgcgacgaccggctttttcagccgctcgccgagcttcacaatcgtgcggttgtattccttgagctgcgcgacgtcgcacatgccgttgcgcaccataaacatgttgttgccgagcggctgaatctcgaggtaatcgtagtaggcggcgatctcgagcagcttttcaaacggctcgttccgcgtcatcgcgcggaacagctcgcccgcctcgcaggctgagccgaggagcagcccctcgcggtgcttgtcgagcacgcttttcggcgtgcggggccgcttgtagaagtaattgaggtgcccgtaggagatcagcttgtacaggtttttcaagccgacgaggttcttcacaagaatgatctggtggtaggtcggcagctttttcgggtcgccgcccgcgagcgcggtgttgatgtcgcgcacgctctccgcgctgaaatcgtcgcgcaggcgctggacgaggttcaaaaagatctcgccgagcaccgccgcgtcgtccgaggcgcggtggtggttgaaaggcttcagcttcaggtatttcgcgaccgtgtcgagcttgcagttgcggatatcccggagcatcgcgcggcacatcgcgaccgtgtcgatgtaaacgtacgggaacgccatctcgtgccggccgcacgcggcgcgcaggaacgaggtgtcaaaatccgcgttgtgcgcaacgaggatcgcgttttcgccgcagaactggaagaacgcccgcacggcctcctcctccttcggcgcgccccgcaccatctcgtcggtgatgccggtcagctcggtgatcttctgcgggatcggcttttcggggtccacaaacgtgttgaagcgttcggtgatctcgccgccgtgaatgcgcaccgcgccgatctcggtgatgcgctccgccttcggcgagaggccggtcgtctcgaggtcgaagcagatgaaatccgcgtcgagccgcgcgtcggtctcgccggtcacggcgggcacgaggtcgttgacgaaatagctctccacgccgtagatcaccttgaagtcgccgccgccctttttgatcttgagccacgcgttcatcgcgtccggaaacgcctgcgcaacgccgtggtcggtgatcgcaatggccttctggccccacttgtacgcctgattgatgagatctccggcgggggtcatgccgtccatcgcggacatattcgtgtgcaggtgcagctccacgcgcttttccttcgccgaatcgaccacctcgaccatctcggcgcgggccaccgcgttcggccgcatgacgttctcgcggtcgtatttgtcgtactccaccgagccggtcacaagcagcgccatgccctttttgatgctgtcggcgcccgagcactcgctcacggactggatcagcttgagcgtgatcgaattcgtgtagtcggtgatgtcgatcgagtagatcttgcgcgtgccgtcgcgcgtctccttaacctctaaatcgaacacctcgccccagatcgtgacgcgcccggcctcgatcgtcgcctcgctgatcggcaccggcgcctttttcggcaggttgccgatcagcggccgcgccgtttcgaggatgatctgcggcatcaggcccgcaccctcgcgcacgctgatgcggcgcttcgcggccttctccttcatcgaggcctcgtagcgctcgacctcctcgacaaccgcggcgcgcatccgcttttcctcctcgatgtgcagcttctggatcaccgattcgtcgccgctttcgagcttcgtcctgccggtgaattccaccgtgaccggcacgccgaaccactcgagcacggtctcgctgattctgcggtcggtgcggcgcttttcgagcagctcgccgccgccgtgcaccagctcaatcgtgagcttatccccctcgagcaccgccgtcgaatcgcggaacgtgccgttaaggctcgcgtccagctcgcgcacgcgctcgagcacggcgggcaggcactcggccgaccacagctcgggcgcaaagcgcggcgcaatctccacgcgcatgccgggcagaatgcggtcgcgcagcttttcgttcaatgcgcgcagcgcgctgtacggtgtaaaacgcggaaagactgtgcggattcgcacagcctgtttttcccggtaaatttcaattttctcgatccggccctcggccagatccgcctgcgccggaagcccggcgctatgtatcaggtcgcctatcgttttcaaatccagttcccctatcggttcagagcttttcgatttcagccatcaaggcgggcagcagctccgcctccggcaccttgcggatgatctgcccctttttgaagatgaggccctcgccgctgccgccggtcacgccgatgtccgcctcgcgcgcctcgcccggaccgttgacgacgcagcccatcacggcgaccgtgatgtccttgtcgatgtgctcgagcgccgcctccacgcggttcgccaggccgatcaggtcgatgcgcgtcctgccgcaggtcgggcaggagacaaatttcacgccgccgcgcaggccgagcgccgagaggatatcgcgccccgcgcggatctcctccgcggggtccgccgtcagcgagacgcgcagcgtatcgccgatgccgcgctgcagaaggctgccgatgccgatcgccgatttcacgatgcccatgcgggccgtgcccgtctcggtgacgccgaggtgcagcgggtaatcacactgcccggcgatccgctcataggcgcggatgttcgtatcgaccgacgaggacttgagcgagatcacgatgtccgtgaagtcgaacttttcaagcagcgacgcgtgatacagcgcgctctcgcaaagcgcctccgccgtgggcgcgccgtatttcgcgaggatcgatttctcgaccgagccggaattcacgccgatgcggatcgggatcttcttctcccggcagatctgcgccacggccttcacgcggtcgtcgccgccgatattgccggggttgatgcggatcttgtcgatgcctgcatgcgccgcctcgagcgcgagcttatagtcaaagtgaatgtccgccacaagcgggatcgaaatcttttccttgatcgccgggatcagccgcaccgcgtccatgtccggaatcgcggcacgcaggatctcgcagcccgccttttcgagcgccacggcctgccggacgctcccctcgatgtcgctcgagggcacgttcagcatcgactgcaccgtgaccggcgcgccgccgccgattttgacgccgcccgccgaaacctgttttgaaatccgtttcatttccccgtcctttccgggcggccatgccgcccctcgccgcgcacgggcaagctgtgcccgcgccgctatttttaaagccgccgtgcaggcgctatccgcccgtcacgatgcgcgcgatgtcgttgaacgtgaccgcgaccatcaggcacagaagcagcacgaagccgcccgcgtgcacccagcgctcgtaccgcgccggaaccggccgccgaaacaccgcctcaattaaaaggaacacaatccgtccgccgtcgagcgccggcagcggaagcaggttcacgatgccgaggttcaccgagatgatcagcatgacatacaggatattgttcaccgcgtcgccgaagctgctctcgagcccggcgctcgccacctgcgtgacggcctgcgccgtgccgacggggccggccagctcgttgaagccgaagcgcccggtcacgaagccgatcaggctctcatacaccatgcgcaccgtggaaaccatatcggcaaaggatttctggatcagcgtccagaccgtccgctcctgtcctacgacgtagaaatcaaggatcacgtggcgcttgccgtcgatcggggccgacatattcaccgccacgtcatcgaagcggatcgtctcgccctcgcgcttcaccgtgaagtcgagcgcggtcgtgtcgtcctccacgttgagcgaggccacgctgagcgcgaacgagagatcctgatcggtgtacacggcgtagccgtccaccgaggtaatcacgtcgcccggctgcatgccggccgccgcgagcggcgaaccctccgcgaatttcgaaatctgcgtcgtggcgtacacgtccgtctgcccgcgcagcaccatcatcatgatgatcgcgagcaggatgttcatgatgccgcccgccgcgacgacgatgatccgctgccaaaccggccggttgccgaacgcgtgcggatcgtcgctgttttcgtcctcgccctccatcgcgcagtagccgccgatcggcagcaggcgcagcgcatactgcgtctccccgcgcgtgaacgaaaagatcttcggccccatgccgatcgcgaactcgttgacgcgcacgcggctgagcttcgccgtgataaagtggccgaattcatggatgaaaatgatcagcccgaacagcagcacgccgatgatcccgagcagaatcccctgcacaatcgtgttcaaagcgacacccctttacctgcaaaatttttccattacatacgcccgcgcggcgcggtcggcctcgagcacgtcggaaacatccgaaacgggctgcgccgggaacgtatccgccgccgcgcagacagcctcgccgatgtcgagccagccgatcttctcctcgagaaacagcgccaccgccgcctcgttcgcgccgttgaccgcggccggcaccgtgccgccgcgggcgatcgcgcgcttgcacgcgccgaagcacgtgaacgtctcctcgtccggcgcaaaaaatgtgagcttccgccagtcggcgagcgaaagccgcttcaccggcgacggatagcgccgcgggtacgtcagcgcgtactggatcggaatgcgcatatccggcacgccgagctgcgcgatcacggaattgtcgcggtactcgatcagcgaatggacgacgctctcgcggtgcacgacgacgtcgatgtccgcgggctccatgtcgaagagccatttcgcctcgataaattcgaggcccttgttcatcagcgtggagctgtcgatcgtcaccttcgcgcccatatcccagttcgggtgcttcagcgcgtccgccgggcgcacgctttcgagcgccgcgcggtctctgccgaagaacggcccgccggacgctgttagtataacccggctgaggtccgattttgtatgcatgccctgcaggcactgaaaaattgcggaatgctcgctgtcaaccggcagaatctccacgccgttttccgcggcagcctgcatcacgagcgcgccgcccgccacaagcgtctccttgttggcgagcgcgagctgctttttggccttcagcgccgcgagcgtcggctcgaggccgaccatgccgacgaccgaattcagcacgacgtcggcaccctcgagcgccgcaagcgcgcagagcccctccatgccgccgtaaacgcgcacgccgaggtcgcgcacagcagcgcgcagcgcttccgccgcctgcaaatcaaaaaccgcaactgcttgcggtttgaattcccggatctgcgtctcgagcagcccgatattggagtgcgcggcgagcgccgccacctcgacggcgccgtccgtcccgcgcaggccgcgcacgacgtcgagcgcctgcgtgccgatcgagcccgtagagccgagcagagataattttttcatggggtcacagtcctttctcagggcaccatcggcagaagccgcagcacgagatagacgaacggcgcggtgaaaatcacgctgtcgaagcggtcgagcacgccgccgtgccccggaatcacgttgccgaaatccttgatatggcagctccgcttgatgagcgaaaagctcagatcgccgagcacggagacgagcgcgccgaacagaccgatgataaagagcgacagcatgttgacctgccgcgtgccgccgtaaaacacctcggcgaagagccagccccaaagctcgagcagcacgatgctggaaataacgccgccgacaagcccctccacggtctttttcgggctgatttcggggcacagcttgtgccggccgaagagcttcccggcgaaaaacgcgccggcgtccggaatccacgccgcaaaaacgcagatcaaagcgtaaaacatgccgtgctgcgcgttcagcccgcgcacgagcacgatggtttgcagcccgagcgggatgatgacgaccatgctgtacacgaccgctatctccttaaacgagatctcccggtgcttcgcgagcagcgcgccgaaaacacaggcagtgaacgccgcgtagacgtacagattcgcgtcctgaaactcgagaaactgcacgagcacggccgtggcgacgcccggcgccgtgatgtaccagcggtttgaaagcccgagcgccttgatgacctcgtacaccgcgagcgccgaaatcagcgcgacagcgatattcagcgccagcgggaacgagcggttaaaaacgatgattgcgagaaaaaagatgaccagaatagctccggagaaaaccctgtccttcatacctgttcctttcacgtgcggaaattgccgtcatacgccgccgaagcgccggctgcggctttggaatttctcgatcgccgcatccagatgtttcggcttaaaatcgggccagaggatgtcgaaagacacgaactcggcataggcgctctgccacagaaggaagtttgagagccgctcctcgccgctcgggcggatgatgagatcggggtcgggctggccggcggtgaaaagcgcgccggagagcatctcctccgtgatgtcaccgggctcgagcgcgccgtccttcacgcgctgggccagcgcccgcgccgcgtgcgcgatctccgcgcggccgccgtagttcatcgcgaggttcaggaccatgccggttttcggggcgctcgcctcctccacacggcggatcagcgcctgcagctcctcgttaaacgccgaaacgtcgccgatgaagcgcacgcggatgttttcatccatgaaatcccgcagcgcctcctcgaggtattggtgaaagagcttcatcagcgcggaaacctcctcggcggggcggttccagttttcggtggaaaacgcgtacaccgtgaggtatttcacgccgatcgaggaagcatagcgcgtgatcgtgcggaaattcgccgccccggcggtgtggccggccgtgcgcggcaggccgcgctttttcgcccacctgccgttgccgtccatgatgatgccgatgtgctgcggcaccgccggtgcagccgttttattcagaaatgccattgctttttaacgtcctttcctccgtattccgaacgggccgggaatcagagggtgataacctctttctgctttgcctcagagcacttatcgacggcctttgtgctcttatccgtgatgtcctgcgccttcttttcggcctgcttgaggtcatcctcggtcagctcgccctccttcttcatcgccttgagcttttcgatcgcatcgcggcggatggagcgcagcgcgaccttcgcgtcctcggccatccggctgacgtccttcacgatctccttgcgcttttcctcggtgagcggcgggaaaacgaggcggatcgtcttgccgtccgactgcgggttgatgccgatgtcggaggtctggatcgcgcgctcaatcgcgcggcagacggagccgtcccacggctggattgtcagcacgcgcgcttccgtgacggacacggacgcaagctggttgaccggcgtcggcgcgccgtagtagtcgaccgtcaccttgtcgagcacggacgggtttgcgcggcccgcgcggatggcggcgtaatcgttctcgagcttctggatggtcttgttcattttgctttcggcttttgccaggacttctttcatatctatgcacctatcctctcagaaatttataaatctgccgcaccgggcggctccctcaaaaccgtgtgccgctcagtcgttctcgatcacggtgccgacgttttcaccgcggacggcgcgcacgatgttctccgggtcctcaatgctgaacacgaggaacgggatgccgcggtccttgcagaaggaggccgccgtcatgtccatcacctgcaaattctggttcagcacatccatataggtaaggcggtcgtacttcttcgcgttcgcgttcttcttcgggtcggaatcgtagacgccgtccaccatcgtcgccttgaggattacctcggcgtcgatctccgcgccgcgcagcgccgcgccggtatcggtggagaagaacgggttgcccgtgccgcagccgaacacgacgacgcggcccttttcaaggtggcgcaccgcgcggttgcggatgtacggctcggcgacctcctgcatggcgatggccgtctgcacgcgcacgtccagtccgacctgctcgaggccgtccgccacgccgagcgcattgatgaccgtcgcgagcatgcccatgtggtcggcgcgcgttctgtccatgctgccgctgctgcggccgcgccagaagttgccgccgccgacgacgatggcgacctcacagcccatatcgacaatttttttgatcggctcgcagatcttgacgaccgtgtcaaaatcgatgccgtggccgacgtttccggaaagcgattcgccgctgagcttcagcagcactcttttgtacttgagacccatacaagttttcctcatttcatttgcataatcattgtcgcgccgccgcgcgcagttacacttatacttattttacatgagccccccgtatttgtaaagcctttccgtgaaatgtttacggaattgaaaaactttcggcttttcggaaatcttcaaacgcagttcacacatggcttttataatggaaaaaaacagcggcccatgcgccgctgaaagccggaaaggacgattccccatgaagcctgctgttcaaacgcgcctgcgcgccgccgcgtgcgccgccgccctagccctcctcctagccgcctgcggcagccccgcggaagaggccgcgcccacggcctcccctgcgccgaccgccgcgcccgaagcaacgcccgccccggagccgaccgaggcgcccgaatccgccgcctcgcctgcggcctctgaaagtcccgcgccgtctgaagcgccggaaagcggcggcaagggcgcctcgctttccgtggaggccgaggcgatgtacccgctgcttgaggcgcacatgctcgcgattttgaacggcggccgctttgacgcggcggaccccgcgtacttctggcagaccgtgtcgttcgcgatcgacggctgcggcctcgaattctacagcgccgagaccgtcggcaacgcgctggtactctcgcgcggcgtcgtggaggaaatcgcctccggcctgttcgaaagcgccggcgatctgcccgagatcccggacgcgctcgccggcgagatcgaatacgacagcgatgcggacgcttacgcccacccgctcggcggaggcggctacagcgtttcggtgctgaacgcggccgaggaaaacggcgtgctgcgccttacgctcgacctcgtctccgatgcggacggcgcggccgtcgcctcgttcacagcggagcttgtggaaaacacgcgcgccggcaactcgctgttcacctacgcggtccgctccatcgagcagcgctgacggcgcaccgagacgcttctgcacagcgccgcacgcggctccgacgacgctccgaaacgttttcacacagcaccgcacacagctccgacagcgcaccgaaacgctttcacacaacgccgaccgcggctgcgcggcgcgccaaatgcccccgcacagcgcttttgccaacgcaggcagcctgtgcgggggatttttattgttgcgaaattatgaattttcgatgaatccatatcgataaataaatatcaatatgcaatttaggcagtttactttcctactgttttggtatacaatgtagtcgaaccgaaaaacagggcggccgaaaggcggctgcccccgaaaagccccgggccttggcggaaagcgccgccgggccgcgcgggccgcaaagaaaggatgttgtgttatggctagatttacacttccccgcgatctgtaccacggcaagggcgcgctggaagagctcaaaaattttgaaggcagccgggcggttgtctgtgtcggcggcggctcgatgaagcgcttcggctttctcgaccgcgcggtcggctatctcaaggaagccggcatggaggtcgagctgatcgagggcatcgagccggacccgtcggtcgagaccgtcatgcgcggcgccgagaagatgcgcgcgttccagccggactggatcgtcgcgatcggcggcggctccccgatcgacgcggccaaggccatgtggatcaaatacgaaaacccggagatcactttcgaggacatgtgcaaggtgttcggcatcccgaagctccgccgcaaggcgcatttctgcgcgatttcctccacctccggcaccgcgaccgaggtcacggcgttttcgatcatcaccgattacgagaagggcatcaagtacccgatcgcggactttgagatcacaccggacgtcgcgatcgtcgatccggagcttgcggagacgatgccgaagaagctcgtcgcgcacaccggcatggacgcgatgacccatgcgattgaggcctatgtctccacggcgaacagcgatttcaccgatcctctcgcgatccacgcgatcgagatgattatgaaggacctcgtgccctcctacaacggcgatatggatgcgcgcgaccgcatgcacaacgcgcagtgcctcgccggcatggcgttctcgaacgcgctgctcggcatcgtgcactcgatggcgcacaagaccggcgccgcgttcgccgattacggcgcgcacatcatccacggcgcggcaaacgcgatgtacctgccgaaggtcatcgccttcaacgcgaaggatgagaccgcaaagaaacgctacggcgtgatcgccgattacatgggcctcggcggccagagcgacgatgaaaaggtcgcgctgctcatcgaatacctcagaaagatgaacgacgcgctgaacatcccgcactgcatcaagtgctacggcgcggacagctacccggccgagaacggctttgtgccggagaacgtgttccttgaaagactgccggagatcgcgaagaatgccatcgccgacgcctgcaccggctcgaacccgcgccagcccagccaagaggaaatggaaaagctcctcaagtgctgctactacgacactgaggtcgatttctaaaatcccgataaattcgactgtgaatccctgccgcccggcgagctttttcctcctgtctcgccgccgcggcggggatttgctgagcggcggcgcgcgactttttgaaagttcgccattgtaatctgcatttttttctgttatactgtagatgttcctgcgttttttgcaggattcggcgcttgaaaatgcgccgcagggataaaaaagcaaaactgaaagaaaggttttgagaattatgtatacgattctgaaaaaagaagcgctgaaccccaccgtcacgcggatggagatcgaagcgccgctcattgccaaaaaggcgcagcccggccagtttatcatcctgcgcgccgaggcggacggcgagcgcatcccgctgacgatcgccgggtacgaccgcgagaaaggcacggtcacgatcattttccagatcgtcggcgcgacgactgaaaagctgaatcacctgaacgcgggccaatgcctgcccgatttcgtcggcccgctcggcacgcccagccacctcgagggcctcaaaaaggtctgcgtgatcggcggcggcgtcggctgcgctatcgcgctgccggtcgccgaagagctgcaccggctcggcgccgaggtcacctcggtcgtcggcttccgcaataaggacctcgtgatccttgaggacgaattcaaggcctgctcgaaagatttcacgctgatgacggacgacggctcccgcggcgagcacggcaacgtgaccgcgccgctcaaggcgatgctcgagcgcggcgagcgctttgacgaggtcatcgcgatcggcccgctgattatgatgaaattcgtctgcctcacgacgaaggaatacggccagaaaaccatcgtctccatgaacccgatcatggtggacggcacgggcatgtgcggcggctgccgcctgaccgtgggcggcaagatgaagttcgcctgcgtggacggcccggatttcgacggccacgaggtcgatttcgacgaggccatgagccgcgcgcgcagctacgcggatttcgaacgccgtgcgcgtgaggaagcctgcaatctgttcaaggaggttcagtaaccatgccgaatatgagacttacaaagaatcccatgccgtcgcaggatccgaatatccgaaacaaaaacttcgatgaggtcacgctcggctataccgaggagatggcgctcgacgaagcgcagcgctgcctgcactgcaagaataaaccctgcgtcaccggctgcccggtgaacatccacatccccgaatttatcgagaagatcgccgccggcgatttcgaggccgcctatcaggtgatccagcgctcctcctccctgcccgccgtctgcggccgcgtatgtccgcaggagacgcagtgcgagggcaagtgtgtgcgcggcatcaagggcgaaccggtcgcgatcggccgccttgagcgcttcgtcgccgactggcacaacgcccacgcgacggcgcagacgcttctgcccccgcaaaacggccacaaggtcgccgtgatcggctccggccctgcaggcctcacctgcgcgggcgacctcgcaaagctcggctacgacgtgacgatcttcgaggcgctgcaccttgcgggcggcgtgctcgtctacggcatcccggaattccgtctgccgaaagcgatcgtgcagaaagaagtggacaacctgaaggcgctcggcgtcaaggtagagacgaacatggtcgtcggccgtgtgctgacgatcgaggagctgaaggacgaatacggcttcgaggcgatcttcctcggcaccggtgcgggcctgccgcgcttcatgggcatcccgggcgagaacctcaagggcgtgtactcggcgaacgagtttttgacgcgcagcaacctgatgaaggcgtaccgcgcggattccgccacgccgatccagcatgcgaagaacgtcgcggttgtcggcggcggcaatgtcgcgatggacgcggcgcgcacggcaaagcgcctcggcgcggagaatgtgtacatcatctaccgccgcagcatgcacgagctgcctgcccgtaaggaggaggtcgaacatgccgaggaggagggcatcatcttcaagacgctgacgaaccccgtcgagatcctgccgaacgatgtgaccgacccgcgcgatcccgcctacggctgggccgcctcaatccgctgcgtcgagatggagctcggcgagccggacgaatcgggccgccgccgcccggtcgtcaaggaaggcagcgaatttgagctgccgatggactgcgtgatcatggcgctcggcacctcgccgaacccgctgatcaaggcgacgacgccgggcctcgagacccagcgccgcggagagatcgtcgcaaacgaggacggccttacctccatcgagggcgtgtacgcgggcggagacgccgtcaccggcgccgcgacggtcatcctcgcgatgggcgcgggcaaaaccgccgccgccgcgatcgacaagtacattcagggcaaggcttgaaccgcctaagctgataaattgatataagaagaacggatacggccccttttatggagcggctgtatccgttctcttttgcttttattcgccgcgcggcgcggatgtgccgatcgggccgcggcagggcggctgccggatcagctcgcccgcccaagtgaacagcagatcggacgttttttcaaaatccagagctgtccccgcctttgccgcgagcgccgcttcgacgatttcacggtccgcgcccgatacggccctgcacagcgcccggtgctgccggatatacgcgccgtgcgcgcagcagtgcttcgcctgcaccgtgaacactgcggatttcaggagcgcgccgagcacctccgggcttttctcgtgcagcatattgtgcgcgcaggcgtggtagagattgcacgcgcccatgcgcacggcgcgctgtgcggccgcctccgtaatgcgcgggcgcaggaaatcaaggctgccgtacacgggcgttgtgtcaaaccagaattgaaagagatccgcgtcgtcccagcgctcgagctccgcgcggcccgcgacgaagccgcagagcagcgcccggtgcggcagcgccgaaaccgcgcggtcgtagcggcgcaggtcgtccgggcagagccggtcgaaaatcacggcggcgtcgatgtcgcttgtctccgacgcctcgccccgcccccggctgccctgcaagccgacacacgacgcgctcgccgaacgccgcgcgcaccgcctcctgaaattccttcatccacacctgcatgtccatgtccgttcccccttttgttccgcgcccgtgatccggcgcgttttgtgcgtaccagtatagcacggcgccgcgcgaagcgcaagcccgcggacttgcattctgccgggccgcgcattataataaggctgatccgacggaaatatggaaaggatgattcggttatgaaaaaagttcttctgctcggcgattcgatccgcatgggctatgacgactacgtgaaggagctgcttgagggcaagtgcgaggtcatttacgaccccgacgacaacggccgtttcgctgcctacacgctttggcaggcaaaccagatgttcaaaaagcacggcaagttcgacgttgtgcactggaacaacggctactgggacatgaacgtcgagccgccgatggcggagccgatgcacccggtcgacgagtacgtccactttttaaagcgcatcctcggcgagtgccgccgcagcggcgcgaaggtgatcttcgccacgacgacgccgatcctcacccccggcaccgcggccgacaacaccggcaccgaggccgacagcatccactacaacgacgcgtgggtgcggcggtacaacgcggcggccacggcgctgatggctgaggaaaacgtgacagtcaacgacctctacgcgctgtgcagggaggacgcgaactgctacaagtgcgccgacatgctccacctcaccgaggagggctaccgcaagtgcgcggcgcaggcggcaaaatatattctggaggcgctcggcgaagcatgagcgctctgaaaaaaacgaatgcgatgcgcctgctcgacagcgcgcggcttccctacgcggtgcgcacgtatgaattcgacgaggacgacctctccggcgtgcacgcggcggacgccgtcggcatggcgcgcgaggcggtgttcaaaacgctcgtcgcccgcggcgataaaaccggctttacagtgttctgcatcccggtcgccgaatcgctcgacctcaaaaaggccgcgaaagcaagcggcaataaggccgtggagttgctgcacgtgaaggagctgctgccggtgaccggctacatccgcggcggctgctcgcccgtcggcatgaaaaagaaattcccgacgtacttcgatgagaccgccgtgctgttcgacgagatcgccgtcagcgccgggcagcgcggcgtgcagctcctcgtgaacccagaggcgctcgccgcgctgatcgaggccgggtacgccgatctgaccgcctgactcaaaacaagagggcgccccgcacggaaccgctcgttccgcagggcgcccttttcgtttgctttcggggaaaatttcacgggtttaagagccagacccccgcgttcaggtacagtgcgaacagcgaccacaaaagatacggcagcatcagaagcccggcgctgcggcgcagcctccaaaagcacagcatcgtgagcgcgacgagcacgcagagcagcgcgagcaccgctgcggccggccccacaagctgaaagcggaagaacacgatcgtccacgaaaaattgaccgcaagctgcacggcgtacaataggagcgcgcagcgccgcccctcgcccgcgctgctccagatcccatacgacgcggcgcccatcatcgcgtagagaagcgcccacgcaaccggaaacacccagcccggcggtgcgagcggcggctggcgcagcgcgctgtaaaacgcgtcgccggcgcccgaaaagagccgcgcgagcaggccgacgagctccgccgccgcgatgccgatcagatagccgtaaacatcccgctttttcaagataatccccctctgcgtcgggggcgcacaaaaaaacgccgcccgccctgcatttttttacagtgtatgcagggcgggcggcgcttattcacgcttcgtccttcacgaggccgagctcgtgcttgattttcgttgtggagatgccgggcgtgcggtccagaaagaccagctcgcagtattccttgagatagtcaaagcggtcgctgccggcccaatcactgcccatcacgacaacgtcgacatggtagtccctgacgtcgctggctttctgctcccagctttcctccgggatgacaagatcgacatagcggatcgcctcgagcatcagcttgcgcgtctcgtaatcgtgaaacgcgaccttgcccttgcccgcgttaaactcgtcggtcgagagcgcgacgatcaggtaatcgccgagcgccttcgcgcgcttcaaaagattgatatgcccgtaatggagcaagtcaaacgtgccgtaggtcaaaactcttttcatggttatccagcctttcccgcgctgccgcgcgatgcttccagcaaggtttctattgaaatcactcgaacaatgcttcaaattcggcgagcgcctgccggttgaacgcctcggggtcaaacgtcttttccgcgcgcatgccgccctgtgcgaacgcgcgcatgccgcgctcgatgcccgcctcggtgttttcgaccagcgtgccgtagccctgccgcaggaaatccgccgggccctcgatgtcggttgaaatcaccggtatgccgaggatcagcgcctccatgatcgtcatcggcagcccctcgtgcagcgaggagaggaagaaagcgctgctctgcgcgaggatcgggtacgggttcgacatggagcggatgacaaagatcctgccgccgcccatttcgagcgccatatcccggattttagcaaactcgctgccgtacccgccgatgatgacgagataggcgttcgggtggtcgggcatgaaggagacgaacgcgcggatcaggcggtccagccccttttcgggcgagaagcgcgcgatattcgtgaagatgaggttccggccgtcgcggagcaccgcgtccagcgcctcgagctcgaccgtgctctgcgtatccgcatcgaaggcgagcggattcagggccttttcccggatgccggcaatatcgttgacattgtgcaccacgtggaggcgctcgccggcaatttccggaaacgcctgccgcagggactgcgtcagcccctcgcgcaccggcgcgatcttatcaaagctgccgtatgcttttcggatggacggcatgtggaaattgcccttgagcttgtactcctgcgccatatcgttgtggacaaaaataatccgccgggcgttcggcatccggctgtagaggtggatgatcttccgctcgtagccggtgtaatggatcaggtactcgaaatgctggcgcggcagcagacgcttgacctcgcgcgagaagtacgattccatctttttctgaatccacttcgtttcgaggttcagccggaagtacagcgcctgcgcaagggtctccgaaaccgtcataaggccgtagccctgcatggaaaggtaggtgacctgctccggcagcaggttgagcgtcaggcggttcttattcacggcgttgcggtagaagatcaccgtgtagttccgcttctcaaggtcgagattgtggagcacggagaggcacgccgtcgtgattccgttcttttgcagggcgccgggcatgatcagcacgttttcccggttgttcgcaaaggccgcgccgtcgatgacctcggcgttctgcacctctgccgcgccgccgaacacgaggcggcagatccgcgccgcgccgtccgcgccgtcatacgtgcagtattccttctgaaacgcgccgtattcctcgaagcactcgagctgccggagcgcctccgccagtgccccgacgctctctacggtcgggaacggcagcgattcatacggcaggtacatgcctctgtcgcgcaggtacgcctccttgtcgtaggcaaagaggatgatctttcggccggtgttcgcgaaatcgaagaaaacgctcgagtaatccgtcacgaggcagtcggccgcgttcaggaattcataggtttcataccggctgtcaaacgggcggatatggcgaaaatcgtcgaacgagatgcgggacgagacgtagttgtgcatctttgcaaagatcaccgtgtcgtcgccgagccggctgtccagctccgccagcatttccaaaatataagcgcactgcgcgtcgttgtcctttttgtcgagcgtgccgcgccaggtcggcatgtagacgacgaccttcttgtccgcgcagccgatctgcgagcggatccgcgcgcggccctccgcatcgaaaaacgcgtcgttgcgcgggtaggggccgaggatgtatttgcccttgaacatgttgtcgagcatgtagtcccgcttcatcacctcgaaggtgaagcggttcggatagagcaggtaatcggccatcagcatgttgcgctgcgagttgccgagctcgttcggcgcgctgatgatcttgcgccccatctgcttgagcggcgtgccgtgccacgtattgaggtacacctgccccggccgcttgatgaagaaggaggcgaaggtcgagttattgacaagatagccgcaggtggcgagcagcttacagtattgccgcgaatagatgcgcacggcctcggcgcggccgccgagtgcgcggagcgccgcctcaacggcgggcatatcgctctttgtggaaacgacgtagagcttcaggtgcgcgtaggcagggtcggtgcacagcgtccgcaggatatagtacgggttgccgaggatgcccttgccgtcgtatgcctgaagcagaacggcgttcgggtcgatctcgcccttttcataccagcgcacgtagtggtagcgcgcgcggaagaacgggcttttccgcgcacgcttcagcgccttgcgcagcgccttgaaccctttggaaatctttgcgatatgtctactcattcgatcattgcctccacaattcgctttgatgcctgcccgtcctgatacgggttgaaccgggcgttgaacgcgccgagctgcgcccccgccccgatgctgcgccgcaccgcgtcggcgagcgcggcctcgtcccggacgatttcgccgggcagctcgtccggctcgagataaaactcgtgcagccggccgcggtaaagctccaagtcatacatataaaacaggatgggccggccgagattcgcataatcaaaaaaaacgctggaatagtccgtaatcagcatatccgaaaccacgtaaaggtcgttgacgtcgtctatgccggagacatccagtacaaagccggcgtaccggctgaaatcaaattgatccgccacaaggtagtgcgcgcggaacaggatgacgaaatcctcgctgaggctcgcccgcagccggtcgaaatcgaccgggcagtcgtatgtatagccctttttcgggtcgtactggtcgtcccgccacgtcggcgcatacagaagaatccgcttctcacagccggaaaggccgagcctctcgcggatacgcgccgcgtcccgctgggtataggcggccagaaaatcgttgcgcgggtagcccagctcgagcaccgcgcccgccttttgggccgcgcgcagcccccacgccgtggtaaacgccgccgatgcaaacggcgagggcgaaagcaggtaatcgagcttttttgcgttttccctgtagcgcgcgtggatctcccgcacgctgttcatcgcgttttccgagcgcacgaggtcgagccccagctttttgagcggcgtgccgtgccagcactgcacgtagacctgctccctgcgcgggacccattcatccggcaccatgaagttgaacacccagtatttggcgcgcgccgccgcgcggtccgcctcggacgagccgaacgcgcagagcttcgtgcgcgggtgcgcctccaaaaagcggtaacgctcggggtccttaaacagccagatcagcgtgaaatcaccgtattccggggtatcgcgcatatattcgtaaatcgccttcgggctgcacgcatagctgcgcccgccgtaggccgcaaaaaccaccgttttttcctctatgtgcggcaggcccgcccggcagagaaaccgcaggcggcgcacgagcgccctactcctccgcgcagcaatccgaagcgccggaaaccgccgtataagcgccgcaggcacggctcgcatgggctgtcactcctttgtccatgtatcgaagcacaagctgcacaatgcggtctacgttgtgcttatcgttcgtctcgacgaactgcgcgcggaacgcctcgagcttttcaaaatcgtacggctcgtgcaggatcttttcgagcagcacgccgaagtccttcgacgcgcagtgcggcatctcccggagagggtcgaaattcaggccgcgctcggccgcgtacgcctcgatgtcgtagacatagaagtacacgggctttttgatgaggctcgcctcgatcgaaatcgccgaatagtcggtgacaacggcgtcggccgccgccatcagcgtaaaggtgccgaacttttcgcactcgagaaacgccggcacctcggggtggtttttcagccgctcgcggtcgagcgggtgcagccgcacgaccaagttgacgccggccgcctcggcggcgcgcagcatcggcgcgaggtcgggcattctgccctcgcggaacgtcggcacatagaggacggttctgcggctgcgcagcgccgggtacgccgcgtagaaacggcggcggcagcgcgaacggtccattttcaggatggcatcgacgcgcggcacaccgatcacgcgcagcttgtccggcgaaacgccgaacgcctcgccgtagatcttcgcggtgcgccggctcgcgcagagcacgcagtcgtagtttcggtgcatgcccatgtgctcggcgatgtccttatcccgcccggcgggcacggcgagcgcctgccggccgaatttctttaccgcgccgagcgcgtgccacacctgcacgatgcgcaggccgggccggtgcttcagcatgctgaccgggatgcagtagccgtccacaatgcagaccgaggccgtcgcgagctgcgccgcacagcgcagcaggtggaagccgtagccgatccgcgcggggagcgtgtcgccgatcatgcggcagaggtagacgatgcgcaccgaggggtctcgcttcgccagcgccgcgccgatctgctcgaaatccgggcgcagcttattgctctgccggctgatcatcacgactttccgctgcatgggcagcagcttgagcggcgcgtacacagccccgtaaagcaccttgaacagcgcgatcaggcagagcaggactctttttttcataggcagcttctgacctttccttgcggataagccgcgccgcagcagaatgccgcgccgcctcgctataccgcccgcgccggccgcacgccctttatacggcagccgactgtataaattctgaattattatagcacaatgttttgaaaatctccatagatttcgcgcaaagttcccaaaaacgtaaaatatttgtaatagtttagaaaaaaacacggccataaaaaaccgtaatttggtggattcgcaaaagaaatcccgccgggccgcctccgcccgcagcgccaaacgcccctcaaagccgcagcctttcccccgcttttgcccgcgcgctttcgctcgctgcttcgttcgacatttttcgacaaaattcgtcatttcgcctcgattttgcaaccggcggctatagaggctctgctagaatcaagcgaaagcggtttaaaaacagagacaaagcaccgcacggaagggatctgaaagcatggtaaaatcccgtatggctgacggacggcgcaatctgattgccgagcggctggtcgagctgcgccttaaaaacaggctctcgcagcgcgccctcgcccgccgcctgtggaggctcggcgtaaagatggacaagagcacgatcgcccggatcgagacgaacaagcggcacgtcacggacatcgagctgcgcgcccttgcgcaggtcttcggcgtgcgctatgcgagcctgctcagcactcccgccgtataccggcggggcggccggccatgaagcggctcgcccgccccgtcgtttttctgctcctgctgctcgccgcgctctcctgcaccgcggccgcacaggagaacggcgtcctgcgcatcgagcaggcgccggaaaccgtgcgccgcggcagcgccttccgcatcacgctcgcgccggtgcggcaggccgcggccttcgtcctcttcgccgaatacgacgccgcggatatcgagcgcgcggaagccgccgtctccggcggctgggacggagactacacctatgtttccgcgcaggagggccgggtcgccgtggtctataccgccgaggacgggcgcgctatgcccgccggcgcgcggattaccttcacctttaaaacacacagcggcgcgctttcggacacgctgcccgtgcgcttcaccgtggcggacgcggcctccgccgacgcgcagccgctgctcggcgcaccgcagacgctcgaagccgccccggcctttcagccggcgccgtcctcaaacagcgccctgctttccctgctgccgcccgagggcgcgctctccccagcctttgacccggatattttcgactacacgcttgaggtgccccacacctgcgcatcgctcgtctttgacgcggtgcccgccgacggcgcgggcgtgcgcgtcaaccgcaaaaacctcggcgcggccggcagtaccactgtctttgaattcacggtcaccgcggccgacggcaagacaaagtccacgtacacggtcgccgtcacgcgcctgaaaaaggacgaaaccggcgcccctggggaaagcccggacagccggctcgtctccctgacgccgcccgagggcgcgctctccccggcctttgacccggatattttcgactacacgctcgaggtgccccacgcctgcgcgtcgctcgtctttgacgcggtgccagccgacggcgcaagcgtgcgcgtcaaccgcaaaaacctcggcgcgcccggcagcaccgtcgattttgaattcaccgtcaccgcggcggacggcaagacgaaatccacgtacacggtcgccgcgacgcgcctgcccgccgaggaaaccgaagcgcccgcggaaagcacggacagccggctcgtctccctgacgccgcccgccgggcagctcgtgccggatttcgaccccgaaattctggattatacgctggacgtgccgttttccagcgtctccctcacctttgacgcggtgccagccgacggcgcaagcgtgcgcgtcaaccgcaaaaatctcggcgcaggcggcagcaccgtcgattttgagtttaccgtcaccgcggccgacggcgagacgaaaaccacgtacaccgttgccgtgacgcgcctcaaaaaggacgccgcgggaagcgccggaggtacgggaagcaccggcggcgggcgcgggcccaccggcaaaaatgccgaaaacagcggcgcggcggatgcttccgagctctccgccgccccgaacgccgccgtctctaaagcggaaccgggtacagcctccgccgcctcggctgcgagcggcatgccggcagacggcacagccggcacggcgccggcccagagcgccgtgtatgaccggctgctgacggtcgggctgacgctgttcagcgtcggcttcggcgcggcgctgacattcctgctcctgcgctttttgcccgccgcaaaagaccgaaaaagaggcagccgcgccggggatgcggacgaaaacaggccggaaagctaggcacacagcggacagcccgtgcatactataggtttgggcaagcagcccggcgccgtttcggcggcgcaactatagaaaggagacggaacgcatggctgaaatccttatcgggcagtcctgcccgatccgcagcagctgcacgccgctgccggaaaacccggtgcccgctatggcctacgtgccctgccagcagtggggccaaaccttcgagccggagcgcgcgctcgatgccggcacgcttttccctgtgctggacaagccgttttacggaaggcggggtgagccgcgatgagcgaacaggcaaagctgcgccggcgcatctccgcggtccagttcgccgcatgggagctgcacctctatctcgattcgcatccgaactgcacggaagcatccaagaagctcaaggagtaccgcgaacagtacaaaaagctgacaagtgaatacgaggataaatacggcccgctgaatgaaacctcccgcgatacaagccgctgggcgtggatcagcgacccgtggccctgggaagcggaggcgaacgaataatgtggatttacgagaaaaagctgcaatacccggtcaagatcaaaaacccgaaccccgctctcgccaaactgatcatcagccagtatggcgggccgcacggtgaaatcggcgcttcgctgcgttatttgagccagcgctacgccatgccgtatcccgagctgcgcgcgattctgacagacgtcggcacagaagaactcgcgcacctcgaaatggtcggcacgatcgtctaccagctcacgcgcaacctgacgcccgagcagatcaaggcgcagggcttcgacacgtatttcgtcgatcacacgaccggcgtttatccggtcgcggcatccggcacgccgttcagcgcggcgaccttctccgtcaccggcgacacgctcgccgacctgaacgaggatctcgccgccgagcagaaggcgcgcatgacgtacgacaacatcctgcgctttgccgacgaccccgacgtgcgtgatccgatcaagttcctgcgcgcccgcgaggtcgtccactaccagcgcttcggcgagggcctgcgcatcgcgacggaccggctcgattccaaaaacttctacgccttcaacccttccttcgacaagtgaatctatccgactgtgcgtgcggcgccctgcggcgtcgcacgcctcttttttgtgcagaacctctaatttactgcggcaaaactttggctgttctgcatccgctttcccgggctttttccatggactttgccccgaaaacgccttataatggagttgcatcccgtacacaggcgccctgcggcccgcttttcggcggggccgcccgcacatacggctgcacggggacggccgcaccggctttcccgccgccggcacaggcctgcgggtgcataaaactcacacaggaggattgattatggcaaaaagcagacttgttggggattaccccgttatcggcatccgcccgaccatcgacggccggcgcggcgccatgaaggtgcgcgaatcgctcgaggcgcagacgatgaacatggcgctttcggcgaagaagctctttgaggaaaacctgcgctattcgaacggcgagcccgtgaaagtcgtcatcgccgacacaacgatcggccgtgccggcgaaacggccgcctgcgccgataaattcagaaaggccggcgtcgacatcacgctgactgtcacgccgtgctggtgctacggctcggagacgatggacatggacccgaacacaatcaagggcgtgtggggcttcaacggcaccgagcgccccggcgcggtgtacctcgcctcggtgctcgcaagccacgcgcagaagggcctgccggcgttcggcatctacggccacgacgtgcaggacgccgacgagacggatattcccgacgacgtgcgcgagaagctgctgcgcttcggccgcgcagccgtcgccgtcgccacgatgcgcggcaagtcctacttacagatcggctccatctgcatgggcatcgcgggctctatcgtgaaccccgacttcttcgaggaatacctcggcatgcgcgtggaatccgtcgatgaggtcgagatcatccgccgcatggaaaacggtatctacgacaaggcggagtttgagcgcgcgctcgcttggcgccgcgagaactgccccgagggcttcgacaagaaccccgccgagctgcaaaagaccgccgagcagaaggaggaggactgggccttcacgctcaagatgatgtgcatcatcaaggacctctacaacggcaacccgaacctgcccgcaggctgcgaggaagagatggtcggccacaacgcgatcgccggcggcttccaaggccagcgccagtggacggatttttacccgaactgcgacttccccgaatcgatgctcaactcgacgttcgactggaacggcccgcgcgagacatacgtgctcgccaccgagaacgatacgctcaacggcgtgagcatgctcttcggcaagctgctgacgaacacggcgcagatcttcgccgacgtgcgcacctactggagccccgaggctgtcaagaaggcaaccggctacgagctcgagggcgtggcgaaggaatcgaagggcttcatccacctgattaactccggcgcggcgtgcatcgacgcgtgcggcgaagtgaaggacgaaaacggaaacggcgtcatgaagccgttctgggaaatgagtgaggacgactgcaaggcgtgcctgaaagcgacgacatggaacgcggccgacatgggctatttccgcggcggcggcttctcctcccgcttcctcacgcgcagcgagatgcccgtcacgatgatgcgcctcaacctcgtcaagggcctcggcccggtgatgcagctcgtcgagggctggaccgtcagcctgcccgacgaggtttcggacaagctctggaagcgcaccgactatacgtggccgtgcacgtggttcgcaccgcgcctgaccggcgagggcgcgttcaaatccgcctacgacgtgatgaacaagtggggcgcaaaccacggcgcgatcagctacggccacatcggcgctgacgtgatcacgctctgctcgatgctgcgcataccggtctgcatgcacaacgtgcccgaggaaaagatcttccgcccggccgtgtggaacgctttcggcatggacgccgagggccaggattacagggcctgccggaacttcggcccgctgtataaataacgaaaacgaggaacccaaaatggaactttcttatatggaactcagagagcagatgtgcgacgtctgccataagatgtggcagctcggctgggtcgccgcgaacgacggcaacctctccgcgaagctgcccgacggcaccttccttgcgacgccgaccggcatcagcaagagctttatcacgcccgaaaagctcgtgcgcatcgacgccgagggcaatgtgctcgagggcctcgagggcttcaggccctcctccgaaatcaagatgcacctgcgctgctacaaggagcgcgacgacgtgggcgccgtgctgcacgcgcatccgccgactgcgaccggctacgccgtggcgcacgtcgatctcgaccgctacacgatgatcgagaccgtgctcgcgatcggctccgtgccggtgacgccgtacggcacgccctccacctacgaggtgccggacgcgatcgccccgtatttgcaggagcacgacgtcgtgctgctcgcaaaccacggcgcgctctccgtcggcgcggacgtgctgacggcctactaccgcatggaaacgctcgagctttacgcgaagatcagcctcacggcgcacctgctcggcggcgagaaggagatctcgcgcgagaacatcgaccggctgatcggcatgcgcaagaactacggcgtgaccggccgccaccccggcttcaagcgctaccgcaaggaggataaggcggaggaataagccgcgcccaaggccggaaataatattatagtatgcagagccgcccgggccgcagaggtctccccctatgcgcccaggcggccttttgcacccatcgccggaaatccgccgtcaaaacccgccgcgcgcagctccggcggccccaagccgcggaacacgggccgcaaatatgcgcagagcgcaggctgggcgccggataaaaaataaaggggccgcacagcggcgtgcatgccccgtgcggccttccgcatatttatttttcttccgcccgatcgccgcgcctcagcgcaggccctctaccgccgcgcgctcggcgggcagcagacgcttgtagcgggcgaggaacgattcaaagccggccgtgtcggccgcgtccggctccgcgcggaccgcctcgctccccgcgaagatgcggctgtcgaggtaatcctcgagcgtcatcccggcgccgttcacgcggtacgcggccagcagcgccatgccccacgggccgccctcgccggccgtctccatgacggagaccggcgtgtgcagcgcacccgccatcagcttttggccgacgcctttcgccttgaagaagccgccgtggccgagcagcgaatcgaccgccgcgtgctcctgctcgatcaaaatatccatgccgatcttcagcgtcgccatcgccgaatagagctgcgtgcgcgcgaaattctcgagcgaaaggcggctgtccggcaggcgggtaaagagcgggcggccctcctccatgccggtgatcggctcgccggaaaagtagttgtaggcggcgaggccgccgcagtccgcctcaccctcgagcgccttgtaaaacagcgtgtcgagcgcgagcggcatcgtgcacggcgcgccgaccgcctcggcgaacgacttgaagagcgcggcccacgcgttgatgtccgaggtgcagttgttgcagtgcaccatcgcgaccggcttaccggccggcgtggtgaccatgtcgatctccatatgcaccttcgagagcgccttttcgagcacgaccatcgcaaagatcgacgtgccggccgagacgttgccggtgcgcacgcgcacgctgttcgtcgcagccatgccggtgccggcgtcaccctccggcgggcagagcggcgcgcccggctcgagcgtaccggtcgggtcgagcagccttgcgccttcggcggtcagcgtgccggccgcctcgccggccgtgcgcactgcgggcagaatcgcgccgagcgtccacgggtagcccttgtccgcgtgcagcgcgtcgaatttctcgagcatcccggcgtcgtaagtgttcgtttcgctgtcgatcgggaacatgcccgaggcgtcgccgacgccgagcacgcgctcgcccgtcagcttccaatggacgtagcccgcgagcgtcgtaataaacgcgatgtccttcacgtgcggctcgccgttcagaatcgcctgatgcaggtgcgcgatgctccagcgctgcgggatgttgaagccgaagcgccgggtgagatccgcggccgcggcctcggtcatcgtattgcgccacgtgcggaacggcacgagcagcgcgccgccgcggtcaaaggcgaggtagccgtgcatcatcgccgagaagccgaggcccttgagccgcttcagctccacgccgtatttctcccgcaccgccgccgcgaggtttttatagctctcctgaatgccgtgccagacatcctcgaggcggtacgtccacacgccgttctccagccggttctcccagtcgaagctgcctgaggcgaggggcgcgccgttttccccgatgagcaccgccttgatgcgcgtggagccaagctcaaggccaaacaccgcctcgcccgcttcaatccatgcgccgatctgcttctgatccatatgattccgtcctttccgatccccgtttgtgtgatccgtgcgcaaacttgtacgcacaacttaatttattataccggatctccccgccgtttacaaggggaaacatcgctaaaaaaccgcatttcaatttgtgcggtgtgtgcgccgcgcgcggggcggtccaactcatagcaggattgtgcatgtttttttgcgattgtctatagcttttcccgctggatattctataataatttcaataaaagagcaaaaatttctgcggcaaatttatcttttgttacaaagccgcctcttccctgcggtatttctggcggtatgcgccgggggcctcccccgttttccgcttgaaaacgcggtggaaatatgtgtaggttccaaagccggtgctttccgcgatctcctcgagcgtggaatcggtgtacttcatctggtcgagcgcgaagctcaggcgcacgtccgtcagataatcgacgacgctctggcccgtgacctcgcggaacaggtgcagcgcgcgcgattcgctgagcgacgccgcagcggcgacctccgccacgcggagcctttcaaaggcgtggtcctcgatgtaccgcttcatgcgggagacgacgaattccgactgcccgccgtgcgcgcggtgcagaagatgctgcaccgaaaggcagaaggcgtgcagcagcgcctcgagataggcgccgccggcgccgtcctgcgggcggcgcgtctcgcggatgatgagcttccacaggtcgaggatcgactcgcccgttggaatctcgaggtgcttgcggccgttcagcccgcggaaccacgcggcaacccattcgccctgacagagcaggtagtaatcgccgctcgtgtcgctcacgtcctgtgcgttgaacggcttgtggatggccagccggtcgcccggcaccagcatcaaaaggtcgccctttttgaggcggagcggctccccgttcagccttgcatcacattcgccgtggctttgcaggcgaaaggtgtaaaaccggcccttttccccctgcgaggtatactgcctgtgcacggaatagccgcacataacgatcgaatccatcttcgcacccctttctccggtgttgcaagaacagtgtaccacaaatttttccgggaaacaatcctgcgcggactcgccgcgtgggttttcaatacaatatcttttggaggaatgacatatgaacaaaatgaaggctgccctgatcggcttcatgccgaaggatgctgacccgtaccagacgcttgaagcctacgcgaaggccggctaccgcgcctttgagggcggcgacctgctcttaaagggcgacccggccgaaaaccgcaggcgcgtggaggccatcggcatgcagccgctcgccgtgcactacaatgcctacggcgagacagatgtctccgagatcatcaaaaacgcacacaccgccggcgtcaagcgcgtcgcgtgctacgcgggcaccgcggcgggttaccgcttcggcgggcgcgaaacgccgcccacgctcgacgacatcctgcgcgaggccgagaagttcgacaaggtcgccgcggcgctccaaaaagaggagctcgtcctctccttccacaaccacgacatcgagttcacgcacacgatcggcggcgtgccggtcatctacctgatggccgcgaacaccgagctgatgaagtttgaagtggactgcggctgggtgacctacgccggccacgacccgatcccgttcatgaaaggcctcggcgaccgcttggccgccgtgcatatcaaggacttcacgcacggcgaggtgccgcgcgaggagggcaacggccacccgcccacgatgccgcgcttcacgacgccgggcaccggcctgctcgatctcaagggctgtttggagacggcgagcggaatgggcatggagtgggcgatcgtcgaacaggatttccagtacaacctgacccagcttgaaacgctgaccgcggcctacctcaacatgaaggagaccggctacgtcgagtaatgccccggcggcgcgccgccaaaacgcttgaaaatcagaaaggaagaatcaatatgcagaacatgcgcaagggcgtgcaggtttacactgtgcgcgaattcatcggcacaccggagggctacgagcagtcgctccgcaagatccgcgaaatcggctacgacagcgtgcagacgtacggctggaagattccggacgcggagcacaaggcgttcctcgaggagctcggcctgacgaccgaatccgtcggcgccaattacgaggagatgctgcgcgaccccgccgcggtcaagaaagccatcgacacggcgcatttctacggcaccgatctcgtcgccatcggcacgctgccggtcccgctgcgcgaaagccgcgagggcttcctcgagtacgccgcaggcatcaataagatcggcgccgagctcaagaaggagggcgtacacctgctgtaccactcgcacgcgctcgagttcttctcgcttggcggcggcgaaaacggcttcgacctgctcttcaatgagacggatcccgaagcgttctggtactgcattgacacgcactggatgcagtccggcggcaagaacccggccgagtacatcttaaaagccaagggccgcgtgccgatcgtccatttcaaggattacaagatcgtcggcggtgccgacccgatcgagcaggtctgcaaggcattcggcgaggtcggcgagggcaacctcgactggccgaagatcatcgaggcatgccgcgccaccgaggtgcgcgcctgcatcgtcgagcaggacatctgcccgcgcgacccgttcgactgcctcaagacgagctttgacaacatggtgaagttcggcctgtaaggcccgcttcccgcataaagacgaaaaaccggcccggcttctgcatcgcgcagtcgccgggccggtcgccttttctatttggattttgaggccgcccctgccctacaccggcacggcctgcttgcgccgcagccagagcacggtgtcgcgcagggtatcgcgcaggtcgcgcgggcggtagccgagctccgccgtggccttgtcgtgcgaaaagcggtcgttgcttttcaaagtgtgaagcgaatacgccgtgtacagcggccgctgtccgcgcaggcgcgcggtccactgcaaaaggggcgccgccgcgcgcgcaaccgccatcggaagcaccggaagccgccgcccgccggcctccccgcgcacgatgtcgagcacctccttgacctcgtagtaccggttcgaaaggatgtagctcgcgccgcaccttccgttttccagcgcaagcaggcagcccgccgccacgtcgcgcacatccacgaaatcgtagccgccgcgcacgcaggccggcagcgcaccgcgcagataatcgcggatgagctgcaccaaatggttgcccgcggtgtcaaacggcccgatgatgccggagggctgcacgaccacggcgtccagcccgtcgcgcaccgcgtcgagcaccgcctgcgtcgcctcggccttcgtcttggcgtagccgcccgtaacgcgctcgggcgagaacgacgcggcctcctgcaagaccgccgggcgcttttcctcggggatcgcgtgcaccgagctgacgtagacgagccgctccacaccatacgcgcggcagagcgccagcacgtttttcgtcccgttcacgttgacgtcgtacagcctttcggaaacctcgtccgcaatgtcgatcagcccggccgtatggatcacgcagagcgccgcgccgccggccgcctcgaagagcgggcgcatcgaatcggcgtcgcgcacgtcgccgcgcatgtaccgcacgtgcggcagcggaaccgggttctccccggggagcacgaggccgcgcaccgtttcgccgcgctttgaaagcatgcgcaccagcgtgccgccgaggtgtccgttcgcgccggtcacaacataaatttttttcataagaaacgccgcctttcaaaaacagacgtgacaaaatcaaacacgatgttgaatttcttctctatctgtattataatagagacagcggcaaaagtgcaagcgacaccttttcccgcggctggcgcttaaccgacaaacccaacagtccgcgtcggttttgtcgggcagttcaccgattgttttcagaaaggcggcccctccatgaagaaaaacgaccaccgcacgcgcgtgacgaaaatgctgatccgcaaggccttcaccgaccagctccggcaaaagccgattcagagcatcacggtcaaggcgctgtgcgacgctgccggcatcaaccgcggcacgttttacgcgcattacaacgatatttacgacctgctcgagcaggttgaggccgaaatgatgcaggatctggaaacggcgttcaagccgcttttggagacggagaccgccgacctcacacagctgcgcatcacggcggagatcttccgctgcctgcgcgacaacgcggacatctgtaccgtgacgctcgggccctacggggacaaatcgttcgcccagcggctgatccagatcgggcgtgaaaaatgcgtggagacctacacgcgctgctttccggacgccgcgccgaagcagatcgagctttactacaccttcatgagcgcgggcagcatcggcctgctcgaaagctggctcgccgacggcatgacgatgactgccgaggaactcgccgcggcggcggaagcgctgatgacgcagggcatcggcttcctgcacggcaaaaaatgagacgaagttcaaaaatacctcttgcattttcagccggtttgtattaaaataaaaagcacagttgaattgcgggcgtagttcaatggcagaacgtcagcttcccaagctgaacacgagggttcgattcccttcgcccgctccaaatcactgtgacaaaatagatgtccaagcgttttgtccagtaaaatcaagggttagcgggcttttcggaagaaattctgaaaagcccgtttgccgtagatgtccaaacaaaaatccatagataatccgactaagcggggcttccgcctgatttttcaggccgggggccccgcttttttgcgtttaccaccctttttccctgttgtcggaactgtaaaagtttccggcagttatatagatagattgacgaaaatccccaaatgagccaatttcaagccctcaagatacaagggggtagtgcgcccttttttagaaccgcttcgactggcaggccggggcggtgtatagtatcatgagaaaggtaagtaaaaagattcaggacataggtaagttaaaggaataaaatgaacaggagaacaactgaaaaggaggtcttctgtttgagttggaaggagagcacagcagtggaacagagaaaagaattcatacaggaatatctggcagggaaagcagacagttttaaggccctctgccataaatacggaatatcagagaaaacaggacacaagtggaaaaaccgattttttgaatatg

SEQ ID NO: 281 - DNA, 29508 bp, UBA1417 FBI02365
  source 1..29508: mol_type = genomic DNA
ttaatatggcaaaaaagtacggatatgttcgcgtctctacgaaaggtcagagtattgatcggcaacttgagaagctaaaggcgcttggtgttacggacgcagatatttttattgacaaaatatctggtgccactttttcgcgcccatcgtatctttcgctgagagagcttatatctcacggagatattttatatattgacagcatagatcgtttaggccgcaactggaccatgacaatttccgagtggaactatatcgttcataccgtaaatgcagatatagcgtctctaacagagacagaggctttttttgatagtcgtcgctttaaagagatgggcgaaattggacagctgattgaaagttacattttgagcacacttgcttgggttgccgatacggatcggaagaaaaagcatgactatcaagctgaaggtatccgttgtgcacgccttcggggccaagtcttcggccgtccgagtattagcgatgataaagtccagcgcttatatgaagcactgtcagcgcgccaattcacaccttttcagatcgccgaaaagctcaatctgcccgcttttgatgtttaccaataccttgacacgggtagcagtgaagccctaacggaagccgacaagtatgagatcacacagctggccaatgtacgaaagtactcatacaaaaaaatagccgcagacacaggagtgtctgtggctactgtatgcaactacgcaaagaaacttaaatcggccatatctaattcaaaataaagcgtaatacaaacgtattatctggctcttagaacgtattacatttgtattgctttgtccggaaatattccacgcacaaaattttcaaaaaatggcttactcactcggctttgccgagttccacaatgaaattgtggacagagttccttatgcccatcaagcactcaaagttactctttgagtgcttgatatccgaaaagaaaccatgaggtgaaagaaatgaaaaaattcgctgaagagctgcggctgcggaatattgatgctgcggttttggcaaaactcgagcaaattgcagagaaaaaagggttacggcgtaacgactacatcaagcggattatcgaaaatgcagcgtacagttcggagctactccttctcgatgaaaaatatgaagctcttgttgctatggtcctacagatcatcgagacgaatgcatccgaaataagtcgcctgacatctctgatcgaaaggatggctgataaagatggctaaaaaaacaaaatcgtttcgtctgtcggaagaggcttgtgccttacttgcacaaatggccgcatcggccggtaaaaatgaaacagctctactcgaatcgctgatacttgaagctggaaaccgagaatccaatcaagccgctgcatctctactctccgctgtcgaacaaaaatatgataacacgatcacaggcatcagattagccactcgaagcgccgagaaaaacatttacattgtcattgagatgctgcacagccttatcatgaatactctgcctaaaaacgaacaaatctacttcccgacacatcgtcttgatatttcgctggcgagccgaaataacgatcctgacaagctcgctgccctgatagaatctcaatcacctatatacagttctgcatttgaggacatcagtgactatttaacaaacctaaagcagcgaaaagataatcgactcaaggaggacacgtgaggacaaaatgacaaatataaaagctggagttgttctggtaacccgctatacaacccctcatagcagtgtttacgaatcctatattgactatatggcaagagactgcgcaaccagacaacgtaacgcaagcaaattcatgttgtcttcattatctgatgatctgagctatgtaggatatgctttcgattatatggatgatgcccgcaaatcatccaatctctttaccgcaactaaggataatctgagtaaagacgatattctggaattacagacagcattccgtaccgcgcaaaaaaacggatctccaatgtggcaaagtataatctcctttgacaatgcctttttagaacaatatggcatatacagccacgaaatgcagttattggatgaaaagcgcattcgatccttgacacgagtttgcttgaaaagaatgctccaaaaagaggatctgctgcaaaccgccgtttatactgcaagcatccactacaacactgacaacatccatgtccatattgcaactgttgaacccatacccactcgtccggaagctaccatcaaaaaaataaccattccgcggcagtttatagctgatcacggcatcttgaacgatgagcgtgattatcgtgtagagcgctcaaccaaagtcacaacctataaaggaggctataacagaattttttcgaagctgacgtcggctctggaacaagaaaacatacccctccatctcggaaactatattaccatcaattcagatcgatcaattacaatgacatatcgcgggaacggaaatcaagtgccgttagatttcagttactcggaagagacagcaatccgcggaaaattttcgaaaagatcgctcgatgctggaaaaagtagtattgtaaatgagataatcaaccagagaggactacaaaccgaaatcaacaatattcttcgcgaaaatattgtgcagcgaatgagaaaaagtgaaattgagtctgatcctgaattaacctctgcttttgtatcactcttgaaaaatttaccttcagatcgtcgcctctggaaatacggaaatcaggctatgacagagtatcggccaatgatcgataaaattacatctacatggatcaataagtactatcctgatgaatacagaaatttggagcggcaccttaaagaaatggatgcagtttatcaaacggcatatggcgcatcaaatagcagctatgcagaaggtaaacgacaagatttatatgcccgttgtggtaatcgtgtcctactcattgcgcgccaaacagtacgtgctttagacagacgcacgtcccagcacgcaggatctccgtctttgccaaagcacatatacaacaacctgaatacctcttatgcttatcagcacgagatcgaaataagtataagactcctgaagaaagcactgtcaaatgactatgagcattttaaaaaccaagttgtatatgagcggcttatgaaggaagccgattatgaggcataccaagatctctaattcccaatatttctgcaatttttgaaagtgggcaaatttgcccactttcatttcagcagaagacgaagcgcttatatcgtattgacaatagcgctaatccttgctattattgaatcatggaagtaatacgcaaggagcaatactatgagcgagaaaatcgacctatcaaagaagataccgattaaagaatacgctgagaaaatcggtaaagattacggttatcttttacggaaatgcagaactggcggctttgaaacggctattaagatcggtacgcaatggttcatcgatgccgatgaaccatatattgaccgcagggttaagtccggcggctacgtaaaaatccgtcaggctgatcatcccattatgcgaaaaaacaaatacggtcccaagaattcaagtttacatgacatatatctatacaagctattgcatccagatgcagctatatctgagattgctactgctctcggtatttccacagcaacagtgtctaaatggtggcaatcagtcatttccctgataaactcacaaaaagatattgacaatagccaataataggtatattatagtcatgaaagaaaggggaatccttatgaaaaccattgcgttttttaacgtcaaaggcggctgtggtaaaaccacaagctgcatcaatatttcgtatatccttgcaactaagtacgaaaagaaagttctactcattgatcttgatccgcaagctaacagttctgatttttttattgaccaagactatgatacgtccatcgaagatgtttttgttggccggaaaaacatcaaagagtgtattcagcataccaaatacgataggttggacatcataccatcaactattactttatcgcgtacagaaaaggcaatggtagcaaatacaacagagccgcagcagctcaagcttgcagcctacttaggtgacatcgaaacagactacgattattgtattttagactgctcgccaagtgccgagacaatcacaaatatcaatggcttagctgctgcaaatgcagtatttgtgccccttaaagctgataaatggaccattaaaggtctccagtatacgttgtcgatcatacaaacggtcaagaagtacaactataaattgacctttggaggagcatttttcgtacagaaagagaatcgacgcgtcaacaaggggtcggaagaagttgtgacagaaatgatcggcaaaaactatctgttgcctggaatttcaaaaggcaaagctgccgaagaatccagttatgctgcagtgccagttttgctttatgataaacgcagtagtatcgcaaaagactatgtgtctcttgtggaacacattttgaagatcgtataaaggagctgtgaagtagatggcaaaattcgatttaaacaagatgaaccttggtgcgggtcttttgaatgagacaacaagacaacttgcacagagagatcttgatctcgtttacatcccatacgagaagttacgtgtagacaagcgcaatcaatattcagtcgatcgcatatctgaacttgctgaatcaatctcagacgtcggattacagcagcctctaaatgttgctgctgctgatgatggaatgtacgacgttcttggtgggcagaggcggtatcttgcaatcggccagcttcgagaggccggcaacaaaaaatatgatgaagtcccctgtactgttgtcaatccgcagaacattgatctcccagtcgatgatgaaacaaagtatctgtatgtcatcgcaaccaccaatgactatcgcgatcttacggacggtgacaagctgctgcgaatccgccaactctcagaagtctatgataaaatcagtaaagctggaggaggcgatcgaattggtaaacgccgccgtgactttatctctgacagcacccaaatgagccctcgctccgtgcaggattttctgagtgtcgagaaaaaactggatgatacactcaaagatgcgataataaatggagatttggatatacataccggtgtaaagattgcttccatgccagcatcaacacagcaaaatcttgcttcccgatattccgactctattaccggtggcagcgaggaaaaagtcgattttgtcgctgaagttgagaggatcaataacccagctccgccgaaaaaagagcagaatattacctcctcagacgctatagtcattggcaaggagtacattgataacatcttaagccaatcaaaagacttaaagctttatgcgaaaatgttttcaaatggtatttctgtttccgcaaaatcaaaagagcggcttgataaactcgctgtagagtacgaaaagttgcaggcaaaatttgttgctgtcctaaaaaaggaagcctcaaagaaatgaagaaacaacagaaggaagttttccctaaaactccttctgttgttttatgatttaattacatttaggtgatattatgataaaagaacaaaagaaaagaaaaaccatgaacctgccaatccgcattgtaaagaggataaatgaagaagcatatagaaaatgggaatcctcatctgcaatcgccctctctattatcgaagaaagttgtgattacgtactgaacctttccgctttgcctcccgttgacaaagtgagtaaagatctcaaaacatcattccggcctgtactgccaaaagatcttacagatcgaattgaatccaaacttggtaaacgccagttcacccatttctttctcacctgctgtgatctacacttttcggatcaactacccatcacctaaaggtaatggactttacgacacattgaataacaggaaaggcggcttccttaatccttgtagacctcccgcctatggcctacagacaaggcgagaattaccaacgcagtatcttctatctgacagatcagacggtaatcacctatccggtatctccactggccgctacgattcgctgtcagcccttttccgtgctgacggggattctcacactcattcaagttcttatcaatccacgcttttatcatacgctgcgtgtacttatcgagtttcttaaactccttgtcaaaccgttctgtcgtttctacgctatacttcataagtccaattccttccataattcggaaatgggcctgcttttctttccgtttttcgcatattcatcataagcttctctacccacggtcacatcatactcgtcctctatccgttcaaacaatgccctcttgaacgcttctcctaaagacatagcgtgtatcttcgcatagctctccgcaagagatttttcttcctctgttaatcgaattgaaaaagccataacttccactcctttcatatagtacattgtactactattattttattctgtcaactctattttgcctcaatctgtttccagcatacagtcaacttgtccgcatagctaaagcaaggcggggtgtcaaactaccttttaaccttctcattcatatattttctccagaatcgcgcgtaagtagtcgaaatgtcttcctttcggatttttatttttggctcttgccgcaatcccactaaaagtcccgccgatcagtgtgcgaacacgctctgcagtcttttgtggatcttccctgtccacatataagttcagttccttatgctttgcaaataagtataagtccctgatctcaccatcagatagacaaaatggctgcagtgctttcctccattctgcaatatactcttcacccaccacttcatcgtcatacaggtactctttttcatacggcaaaaggtactgttctcttcgagtcagttctttacgactccccgtcaaatcaaacctaatcgaggctactttcttaccggaacgaatcggtgtaaaagttacttgcagatttgtgtgcttgtttatttcagcgacagaatacttcagaacacgttgactaaaatacttgtattcgctgtaaatcccctcactctgctcgtccatcttgaaaactttgtgcttgagataatctacggtttgttcgacaatcacatttccaaaattaaatttgtcgagcaaatacaagtacagcaacatagaatacttgccggacattggaatgacattctttagacgataccggatatatcctacgccctgcagattgaaaaaaagacgctttgcatcctcatgacaagtcatctcgataattattgagttgtcatccttcctgcgaaacatcgcggatctgacaaacagtggcgctcttacgaatcctcttttttcttcatcatcaatttcatacgtaaacttgatattctcgagttggtccaaaggaagatctttatgcgtctctttcagatcctgactctctccaagcagagtccctattctttcatatcgtatgcgttcaaccccaaacagatctgctaattcgtcaagagtaaagcgaacagttcgcgaattctcatcccttggatctattctggaaaggtatatatccaagaatttcatctgcatggttgaatagaccatatcgctcagattaagaatccttcggcttttctctacaacataatccgggctgagtggaccttcaatgatccgctcttcctgctggggcacaacactcactcctcttcaacttgtccatttataaccgatcataacacaaaagtgacttcatgtcaacatgtaagtcacttttttaaaaaaacgttcttttcgtcaaagcacagataaaaaaggttacaaatggacaactacgtcacctaaaaaatggcttagtaccggggaaaaaacggattttgatcacctaaaaaaagttacaaaatggacaactacgtcacctcaaatggacaactacgtcacctttaatggacaactacgtcacctcaaagttcaaaaaacccagtatttaagccatttttcgcgccccttaaatatctatataaatatcttttaaatatctttttctttattataggcaatcctacgaaaaaatttttcttcatgttgttttattgacaacaagtaaaaaaatggctatactctattatagagagaccattcaaaaaggtatgcttttttaaatcttgaggcaagttacacttatcaacttactaaataaacaactttatgaagtgctgcaaaagaagcagcacttctttttttcatgatagtagtataccacaaagctcttttaatagctactttatccgtactgatttctcatgaaaattttaaaagtgaccatcctgtccgattacatataaaagaagaagcttgcttaaaaccttataaaagtgacgcagttgtccaatatacagtttatttaaaagtgatgtagttgtccaaaagccttttctcatagcctgcatgacaaaatcattaaccagaatagggaataagagtagtataaactcaaaatatggaggaatattacaaggaaatccccaatattatgggtatagagaaaaagggacgcaatttatccaagacaaaggtgactgtcgtatccattgggtatactggtaaaggtgacgtagttgtccagaggggaaattgactaaaaagagggaaaagtgacgtacttgtccagcgaaaaatagaaaggataaaaacactaaaggtgactatattgtccatgaaaaaaatcatgagtatgtaaggattttgcaggcaataataaaagtgggcaaatttgcccacttttattattcgcataatattaaagcaaggggagaagggaaaaaggggggatagatcagcttagacacttaagttagagtagtgtatacctaagatcgtttatcatctatgaagtgaaacagagtaatagatacaacaacacaattatacaaaattaatgttttgtataatttaggcaagggtgggcaaatttgcccactcatttatttcttaattttttttccattcaatgtaataaatgaaaacgcctttggcggctccgttatccaaagtttgtttatgtcaaaattatgtttatctaagacagcacggcaattcttatttgcacaaaaatctcttttgaaatcctttttgcttgcactttgagttaagtctgaaattcgagaaacatctgtacatcgctccaattcatcctccagattttttacttggggaagaaatacgatttcaactttcgggcaaaactttttgacctgattgatattattccggagctgctgagttacaggtacgtctgtatcaaaaacaaaaactacttttgtttccggacgaatcgatataaggatagatttaggtattattttttgtatcagattaaattccttgatttttccgggtataatcttttctgggctttccttaagggcctgaagtaatgcaacttcacatttcccttctacaaagtaaaagacattattcttcatatggtgatatatgctctaagtgacttcttaatcatgattttgtcatggttagtgaagcaatcacttagagcatttttgtttcaggaggtacagccatgagaaatgaaaaaattactccactgtacgagcgcctgagccgggacgatgagttacagggcgagagcaattccatatccaatcaaaagcagatgttagaggattttgcccgccggaacgggctgcccaaccctacgcactttaccgatgatggtatctcaggcacccgttttgaccgccccggatttttggcgatgatggaggaagtggaggcagggcgtgtagaggcaatcgtcatcaaggacatgagccgattggggcgcgactatctgaaggtcggtcaggtcatggaggttttgcggcagcgaggcgttcgtctgattgccatcaacgacggtgtggacagtctgaaaggcgatgacgattttaccccgttccgtaacatcatgaatgaattttacgcccgtgataccagccggaaaatccgctctgtgtttaagtcaaaaggcatgagtggtaagcacctgacaggcaccgtgatttacggctacttatgggacgaaaaacgggagcattggctggtagatgaagaagccgccgaagtggtacgccgtatcttttccctcacgctggagggatatgggccttatcagattgcttgcaaactatccgcagaccggattgaaattcctgtcgtacaccttgcccgcttcaacgagggtgtgaaccgctcaaagccggtcaaagacccctatggatggggatcatctaccatcgtgaacattttgaaaaagcgagagtatttagggcacaccatcaatttcaagacccgcaagcactttaaggacaagaaaagccactatgtttctgaggacgaatggacgatctttgagaatacccatgaagccattatcgaccagccgacctttgatttagtacagaaaatccgcagcaatgtacggcgttatccaaacggctggggcgaagcggctcccctcacaggcttgctctattgtgccgattgtggcggcaagatgtatgtccaccgcaccaacaatggaaagcggatttctcaatatacctgttccaattataccaaaattccgtgtgggacactatgtcccactcaacaccgtatcaatgagagtgctgttctgacattggtttccgacacgctccgggctatcgctgaatattccagaaatgaccggacggaatttattcacaccgttcaggagacgcaggttgctcaacagagtgccgatatatcgaaaaagcgcaggcgtctggccgctgctcaaaagagagccggagaactggaaaaactgatttgcaaaatctatgaggacaacgccctcggcaagttgccggacgcacgatatagggcgcttgatgcacagtatgccaaagagcaggacacacttgagattgaaattgcggagttggaaaaggctgttaccggctacgaacagagccagaaatcagcagagaaatttatagctctgattgataagtacgagaattttgacactctgacaaacaccatgctcaacgagtttgtagagaaaatccttgtccacgaacgcgcccgaaaaggcagtcaggacaccacgcaggaaattgaaatctacttcaattttttaggacgctatatccccccatccttacagccggttcctttaaccccggaggaacaggaagaactgcggaaaaaagaagaacgcaaggacaggctccatcagaactatttgaagcggaaagccagcggcgcacagaaacggtatgaggacaaaatcaaggcgaagaaaaaagcggaaatggacgctaagaaagccctgatccgggctgaggatatgaaaaaaggcgttttttctactgtcggacagctgccgaaagaagaaccacgcaaaggcagcatagcagccagcgcagcagtctaatcatcacgaagcaaaggagaatgaatatgagtaagttgacttacattcgttgtggagattatgatatacccaacctaaaactttctgaacagccggaaacttctatcggcaagtacggcagaatgcgaaaatcctacctaaaggaacatcgccccattctctacaaccatctgctgatgagcgagaagctgtatccacacctgttagagattgagcggacagcacaggggcgtgtggaaaccatgttgcctcacatgatggaagttgcgggtgtcacggaagaactgaaagcctgtgaccctatgcgttgggtggggctgatgaacacattaacggcacagattgaggaaattttaatcagggaactgatttgcagctgaatgggaggtgcgggaaatgctgacctttgaaaaggttttgaaagtgtttcaggcatatctggatgatgaccctttgtatgaggtggttcagaccagcctcggttatacattgatggcatgggagccccaccggaatgactggtacagcgccgagatacagaaaaccccggaggatttacggaacgctttgttgagtacatacgctaactttctggaagataaaattaccggaaacgagcgtgaactgactgtgacagaaaccggagaaatccagcagaggtgccgggaacttttggaaaagtgcagggaaacatgatacagaaacgccagaaggaggccgcgattatgcgtcctccttctgtttcgcagtctgttccattttgagcgccccgtctatggcaccttcgataatcggcaggtattgttcaggacagagcttcagcttgtggctgacccgctgccgctgatcgctttcttcccgcatgatctccgggttaaaataccgctctacgggaagtccgcagaccttaatcaactggatcatcacaggcaggctcggaatcgcaccttgattttcaatgttggcaagataccgccattcaatcccaaccatttctgccaatgtttttcgtgcaagacgctttgcctttcgtgcggctttgacatctgcaccgaaggtttcaaaaccgggacaatcttcaacttttgccatataatatcacctggttacattgtataattcatactttgcccgtggaatgttgctatatgcaggttggttgaagtttataattcatgtttttaggtttgaaatctggcatatagaaaactataataatgattagaactccacacaaatcacaaaattttatgctactataccagtggaggtggttttatgcagcacattttaattgttgaggacgatttagatattcaagatcttttaagaaattttttgcaagaagtcggatatgaaattacgattgcaagtgatggcatggaggctattgcactgttttcatccgctcattttgacttgatattattggatataatgttgcctaaaattgatggatttacagtctgcgagctaatccgtaagcaatcacaggttcctatcattatgctaactgctctaaacggagaggaggaacaaatccgaggcttagatttacaggttgacgattatattacaaagccattctccatgccaatattggttcgcaaaatcggagctgttctccgcagaagttccatgataccggagcaggaacaccaaacgattacctataaaaatcttgttctggatatggacagttataccgctgtggtagacggtgtttcttttgaccttacccagcgagaatttgaggtgttaagggagcttctgctaaatcaaggtcgtgtacttacgcggcaaaatctgctggataagctatggaaatatgacttttatggcgatgaaagggttgtagatactcacatcaaaaatcttcgcaaaaagttggggattgacttcatccagacaatcagaggggtgggatataaaattgataaagaaaattaaaggaagcctatttgcaaagatatttgcaatcacttttttgctgaccagtatttgctgcgttctgacatataccgtcatttcatggctcgttcccaaaacatatagcacaacacttgacgcaaacctggaaaatacggtttcttcctttattacggagttgcaaaccatgtccccgttggaaagcggaaagctcttcgatgagtttcttttgaacaataacggggtattacttcaactattcgacgagaacggtaacgcaatcgaactgccctcacagggggcaaaagaatttccacattttcttgatggaggaatagcaactgaaaatactgatccggcggcgtatcgggcaacacatagctatctgttctctttcgcaggattggacactttttatacattgacagttgccgggagcgcacatgaggttgacttgcttaggaatactctggcaaatgtgtttatcattctattttttgttattcttattattgctacgcttgcttcaatgatttattcccgctatgttacaaggcccgtattacgacttagcgcagtgtcaaaaaatatgtctgcactaaactttaattggaattgtgaagaagatcggacagacgaaattggtgtcttggcacatagcttgaatgaaatgtctaaaaagttatctgccgctttggaaaatcttcaggcggcaaatataaaattgcaggcagacatagagcacgaaaaagaattagaacaggcgcaacttgattttttctctgctgtttctcacgaattaaaaacgcctattacgattatcaaggggcaaacagaggggatgattttgaatgtgggcgattatcaggatcgcaataaatatctatcgcgctcccttgaaatcatcaatacaatggagagcatggtacaagaaatactgacggtttcgcgcatgaaatcatctaaagtaggtctgagaaaagaaaaaatggatttttctgatcttctgaaacgggaatatgctttatttgaggatctgatcgtacaaaaggaaattgactggaacgagaatatttctcccgccctgcaaatcgccgcagacaaaatgctgatacaaaaagcaattaacaatattgtttctaatgccatcttgtattctccgagaggcagttcaatctatatggacgcattttctaaaaatgggtcggtagttttccagatagaaaatactggtgtgcatattccagaggcagaaatttcaaaattgtttgatgctttttataggatggagcaatcacgcaatcgaaaaacagggggtagcggattagggctttatatcgtcaaaactattttagaacagcacaatataatatacagcttgaaaaacacagacagaggggtattgttttcaatccgattttgaaaaatacggggcggtcaaatttgatcgccccgcatttttaactacacataaaaaacatattcgccacaatggtatcccaaacagttctgctactatatatttagaaacagaaaggagtgtttcagaatatgaaaaaacaaaaaatcacaactcttttactcacaatggcgctttgtgcatcggctgttttaagtggctgtgcggcaagcgcggcaagccagacggaacccaaccagtcaactaccagctcaacgccttttgaggaggcgaaagatagcggcactcccatttcctctgacgaggcttcctcggtgcaagcctacgagaatgatgaagtcctttcctctgaggaacaggccaaagcggagcaagaacgccgggctgaggttgctgaaaagtattctatctatgaaccgtatggtatgacatacgacacggaaaaggatcgtttcttctataacgggcaagtcgtgcgttacttcaaggatcatatcaattctaatgaaacgaatggcttttcctatgatgacggtgtgatagacgttgaacccattagagatgaagatggaactctgacgggtctaaagcaatcctcggacgctgactttaatgctcgcaccaaagagcaggaggcattgaaagccgaattggaaaaggcgggaattacggccggaagtggtagctttgaacaaggcgatccaaattatcgtgatgacagtctggacgcatacaccgaatttggcgtttcttatgacaagtcttctaatcattggatgtacggcgaaaagcctatctatatcctttacgacaaggagcattacactttttgcgacaaaggtgtgagtgatggcgttagtttgaatgttgttcgtgacaaggccggcaacattgaaaagctggtttctgtggataagggagaattagaacagtttgtgaaataacttgtgaattgccggacgacggcaaaagaaaaaaagccgtcgtacagcagacacattttcacgtgcctatgaagcggcggctttgattttcagagccgccgtttcttttcgtctatcccaatctaacgacgacctaacaccgtgtaaatccacggcggcatataggaggattgccgccgtgtctatttttgtcttttttcacagtacccatgacctgcaccagctaaaaaaagcctgtttccagcagcggggcaatgcggtcagaagtatgtactataccatgtaagcgaacagcaaaatatattccatgacgctcgtatggctttatgccgtccgggcgcttttttgtccctatggagccgaaacatcgggtcagcatggcccgaactttatccccgatgtcgctccccgccgccccattcagatttaccaaaaaaatctgaatggaggaaaggcagatggaagttaccatcaattataacggacaagctgtagctgtggaggtcacgctggaagtctatgaatttcttgaccgggccgatcacaaaacggaaaacctgttccatgaacagcggcggcattgggatggccgggagtttgacgagtacatcattaccaccgagggtgtaggagcctacggcgaaacgccggaagaatatctttgccgcatggaaacgctgcatgagctgatggcggttctggacacctgcaccaatgtccagcgcagccggttcctgctctatgcgcttgacgggctgagccttgcagagatcggtgtgctgtgcggctgctccaaagtggctgtgtatcaaagtgtggaggcggtcagaaaaaaatttataaatttctttgaaaacaggcttaacgaatgacctgttttctggctaccaagtgaaagggatcatttcccttatctcagcgaggggcggacagcggacgagctgcccgcctctccgattttcaggaggtaagcctatgaaaacaatcaatctgcggtggatgtatccccactaccggcatgacgagtttgtggatgttacggacgaggtatgggcagcgatgtatcgggcccagcgggagatggagaactatgagcgtcggaaagtctaccaccgcgcctactactctctggacgcatacagctggctggaaaattacgcactggaacacagcagatcgccggaagatattttgctggaacgagaagaaatgaccacccgcctgcacctgatagcagctctgccggtggctctggctcatgccactccgacgcaggcccgccgtgttcacgcctactacattgccggtatcaagcagccggaaatatcccggagagagggcgtccacagcagcaaggtcagcgtttccatccgccggggtctgcggaatatgcgccgttgctatgatggccttttccaaacagagtgagggcgtgcctatgcagaccatcaatctcaaacaatattatccattttgcaaagaggacatttttgtggaggtgtccgatgagatcgtcgaagcgtttcttctggataagagagccgaggccgccagagaacgcaagatgttccgctataaggcgttttactccctcgattgtaacgacggaatcgaaaatgccgcaatcggctgggcgcagccatcgccggaggatcatctgatagaaaaagaggaattagccgaatatgaagaactgatacggcgattgtatgaagccatttcttccctgccgcctatgcaggctcgccgtgtccatgcccgctatatgctgggtatgaaagtgaaagatattgctgcaatggagggtatcacaccatcgcaggcgggaaaatccatccacgctgcattgcgggggctacgccggtactttgcgcgtcagaaatggacggtcaatctatgagcgtttccaaagaaaagaggtgcatgacatgaacgaaaaaattacagcccacccctcaaaagaagaacgggagaaagtcctgaaggagatctggcagcttgaaaaccgcaagaagattttagagaacaagcagcggaatgaagaacgcagggttcgcacccgccgcttgattgagcgcggagccattttagaggggattttcccgctggctcctaacctttccggcgcagaggtcaaagcatttctgattgccctgtcccaccttccgggggctgtggaattgactgcaatccttccaaaatccggggacacaccataagtcccttgtttacaagggcgcacttatacaccgttgccggtgctgtgcgccctgccgggggcgttgcgtacttcgtccgcgatgggaagctacgctccccaaaccccttgtgcgctctgcgcagccaaacacccgctttgcgtttgtccggctccacagagtctgttatctccctcactgaaaggaggtgttccccatagatttctgtcatatccctgtcagtatcatcaagcgcagcgcaggccgttctgccgttgccgcagctgcttaccgtagcggaaccaagctgacaaatgaatgggacggaatgacccacgactacacccggaaaggcggcattgttcatgcggagatcatgctgcctgcccacgccccgccggaatttgcagaccgttctatcctctggaacagtgtggagcaaatcgagaaagcaagggacagccagcttgcccgcgagatcgaagcagctctgccccgtgaactgtccggcgaacaacagcttgcccttgtgcgtgcctatgtgaaggacaactttgtagacaaaggaatgtgcgccgattttgctatccatgacaagggaaccggcaaccctcatgtccatatcatgctgacgctccggcctttgaaagaaaacgggcagtggggtgcaaagtgccgcaaggcatacgatctggacgagaacggacagcgcatcccggatgggaaaggcggctggaaaaatcatcgggaggatacgaccgactggaacgataaaggaaatgtggagatttggcgggcagcgtgggcagcctacaccaaccgggcgctggaatctgccggtagaccggagcgcattgaccaccgcagctacaagcggcagggcattgataaaatcccctctgtccatctggggccagctgccagccaaatggaaaagcgcggtatccgcaccgacaagggagaggtaaaccggcagatcgccgccgacaacaaactgctgaaagaaattaaagcccgcattacccgtctttatcgctggtcaaaagccgaagcggaaaaaccacaaacgcagcaaagcagcttgaccgccttgtgggaagcccagcagcagttgaacgctccccgcacccgcaccggcaaaatccgggccttgcaggaaagcgctgcactattcagctttttgcaggcaaacggcatccagtctatgcagcagctccatgaaaaaatcgctgatatgaacatccgttactatgacctgcggggaaagatcgtcaaggcagaacgccggatcgccgctcttaccgagcgcggggagatgtgggaacagtacaaccggtacaagtccatccacaagcagcttgccaaagtaaagccggaaaagcgggaacagtttgagcagcgccacagccgggaactgatcctgtatgacgcagcagcccggtatctgaaagaattgaaagacagcggtgaggcaatcaccccgaaggcatggcagcgggaaatcgaccagctgatcgccggaaagcagacggacacgcttgccatgaaatccatgagggaggatttgaaagcagtggaacggctccgcaaaaccgccgagcagctgtcccgacaggaaagggacaagtctcacgaccgtgggccggagcggtaaaggctaccgcgttttggcgtacccctgtcaagtacgtcgcgtttcacgacatacctttgcatacagaaaaaccgccgtacaggtttccccatacggcggcagactgtttatttgccgaacaagtcgctgtgtgtgccggtgcgggccagcgtcagcaccagaacatcatcctctatgcgatagacaagcagccagtccgggagaatatgacattcccgatggcctgcccaatcgccggacaggtcatggtcgcggttcttatccggcagcggttcgcccattgccagcaatgctacgacctgctccagcagctcgatcttcaagccacgctttatggctcgtttgtagtcttttttgaaactggtcgtgtacttgacggtatatttggtttctttcatcttttcaggtcagcaaataactcgtcaaggtcattgtagccctttacagacgggtcttttgcaatcctttccgcttccagcatggcagcaaccgtttctttgttcggctgttccagccttacctcaaagggaatgccgccttcacgaagcgactggcgcacaaagatgttaaacgccgtagtcaggttcatgccaagttccgtaaacagtgcgtccgcctgcgctttcaaatctgcgtccatgcggatactgatgtttgtggtatttccagccatacgatcaacccctttctgctggcaattatagtatatgccatttgcacgaagaaaacaatactttgcacgaatatttaacgataaattcattcaaggaggatacctgctttatgaaagaaatcatttatgaagaacaacaagactgaacctatccctgtcatggattaccgccagtaccgcagagcgcggaggctggtgcatgagtgctgtaactacatcgacggaaactgtatctccctggacgatggggaggaatgtgtctgtgtccagtctatttcctactccctgttgtgcaggtggtttcgggcggcggtattaccgcaggataaggaactggaaacggcgctgttccaccggctgaatgctaagaaatgcgccgtatgtggggcgctgtttacccccggttctaacagagccaaatactgcccggaatgtgccgcgcgcatgaaacggatcaacgccgcaaagcgcaagcggaaacaacgggagaaatgtcacgctttaggggctgaaaaacccttgtaaatcaaggcttttttcgagggtgtcaaaggcaggctgatagatttatcctccgacccctaaaacggccttaaaatgcgtacagaatcccaagagaaaccccaaggaggaaccctatgtcagacaaccgaaaatattattacttgaaactcaaagaaaactattttgacgatgattccatcgtgctgctggaaagtatgcaggatggtgtgctgtattccaacattctgctcaagctgtatctgaaatcgctgaaacatggtggacggcttcaacttgacgaggacattccttacacggcgcagatgatcgccaccattacccgccagcagatcggcactgtggagagagccttgcagatctttttaaagctgggtcttgtggaagtgctggacagcggcacattctacatgagcaacatcgaacttttaatcggccagtcctctaccgaggctgagcgaaagcgggctgcgaggctccaaaacaaggctctttccgcggcccggacaaacggcggacatttgtccgacattcgtccaccagagatagagatagagttagagaaagagatagagataaagagagagatagagaagggacaccccgcccacgcctatggccgttaccagaatgttttcctgacggacggggaactggcagacttacaggccagctttcccactgtatggggccagtacatcgaaaagctgtccgagtacatggcttctaccggcaagcgttatcagagccatgtcgccaccatccggcgctgggccggtgaggacgcgaagaaagcagccctgccctctcgcaaccgggattacagcgtaaaggaggatgaaaccgtatgattgagattaccgcagaaatccgggcgctgattgacaaggcagccgccggtgtggaactggctgaggacgagtgtatagacctgtcagacggtctcatccactgtaagaaatgcggcggccagaggcagactgttgtgccatgcttcgggaaatccggctactttatgccgcgctgcatctgccagtgccagcgggaggctgaggagcagcgcaaggctgctgaagaacggcagcgccgcatggagcgtatcaaacgccgaaaggcacagggtttgcaagaccgttatctgtacgactacacattttccaatgacaacggccaaaatcccctgatggacaaggcccgcgcctatgtggagaactggaaggaggcatacaggaacaacaccggcctgctgttgtttggggatgtgggaaccggcaagtcctttttcgccggttgtatcgccaacgccctgcttgaccgggatgtgccggtgctgatgacgaactttcctaccatcctgaaccgcctgaccgggatgttctctgaggacaggtcggagtttattgccagctttgacgagtatgacctgcttatcattgacgatctgggtgtagagcgcagtacagaatatgctatggagcagatgtttttcgtcatcgacagccgctatcgcagccgcagacccatgattatcacaacaaacttgaaactgtccgagttaaaaaacccgcccgatctggctcacgcccgtatctatgaccgtattctggaacggtgtgcgccgattctctttgacgggaagaatttccgggaagaaaatgccggtgctacccgacaggcagcaaaagacattgtaaacagtaagcacgactgattttttaccgggcggcacagacccgttcggagaaaggagcgccatgaacagagaaccccgtactatgcaggtggcagacgccgctactgcgtccagagcgccggaaaacacgccagcgatggtaaagaaaatcggtaagacaacctacaaggttcatgtccatttcagcaataccagcacagaaaccatgagcgataaaatcaagcgtatgctcaaaaatgaaattcagcagatgtaacagactgataaacgaagccgccttgtgctaaactgatgatggtacgcaccaaaatttttgtcaaggaggacacgaaaatgctttacacagaaaaagagaaacatgaaattgagcgagtaaaggaagtctttacggaacatctgcggcaaagccctgattttgaactgctctggtcggacaaggtgggctatgtctggctgacgattggcgtaaatccgctttatgtggatactggcatcaggatagaatcagccgccgatctctgcggcaggtgtttggacgatgttgctacggatgttttgtatatgacgggcaacgatcatgcactggaagcagccgatccgctggaattggccgaaatcaagaggcgttgggagccatatatcaaccagctgccagactacgcgtatctctgcaaagacctgctgaacggaaaaatgtaatctatcaaacgaggtgtcaggagccatacggtgcttctggcaccttttttgtagattttttgtgaatttgattaaaaaatccttgacaatctgtctctgggcctccggattcaagtgtatccaatagggaatcatccggcagagaagaaaagacatcgttttctactgcatgtcgaactgaatctgtatttcttttcagaatatcagaagcgtagatgacggttacttcttcgcattcaccttcagtgatcttcttccgaagaaaggcaaaagcatgcttagggatattaagatcgagcatatctgtgttatgagttgtaaagatcagttgctcgttttctttcaaatgctcgatcattaacccgaagatacgcttctctatatcgctctgaatataggaaaaatgttcatcgcagtaatagaaaacattgttttctttgggagataacatagaagcaagaaaaaatgcaacgtcaattccctctatagttccactagatagcaattcgcgattcaatagttttccgttctgaataataatctcgtcattctttctacgaatgataaaggaatcctgcagatcagaggatatagacacatttgtcagtgtaggatctaaagttccaaggacagcttttagtgtcctcaacagaacgtatttgttgatgcctttggcgttcaaagatgattctatttccggatatgcaaaacgaaagtttatttttccaaaatgatcgcgcatttctttcggcgttgtagtagtaaaatcaggattgaaaaaataagtacaatcctgaaatcttgaaacgcttttttcatatgaatcaccatcgagaatcaatgaataaaaatagcgcatgtttatctctgaggtatttggataaatgcgtactactaatctgtgcagaacaaatccttcatttataaaatcgatactgaacgaacctgcgcttccttttgaaacgatttcaaagagaaaattcggatttccagagttgataaaggaaaagatcttcatcaaaatttttccaatacttgtttttccagcggcatttgctcccattagcacaatagcctttttatatctgaaattaggtcttccggctaagtgttccccttcgatgattgaattaactattttttttggatacgaaaaattcattttgaaattgggaaatccaaggatattttctaattcgagattcattattaccataagttcagcctccctcttttattatttcgcaatttacgaagtaattatacaccatattttaattttgttcaagaagaaaaggatctgttatatatattcagaacttagtttcggttttcccatttacggacaaggttgtagaatgtacaccgtgtcaattctaagtcctcggcagcttttactgcggtaagctccccggctctccatttcttatatacctgctcccacattttcgggtaggagattcttggccgaccaagatgttttcctttcttttttgcaacagcgattccttcagcctgacgctccttaatcatccggcgttcctgctcggcgaagctggccatcacttcgatcagtacgttgtttaccatatctatgatccattcttgtccatcctgcaggtctatcatcgttgtcgggatgtccatcaccattacacggatatgctgcgcacggaagtattccaactcctgccggatgtgctgcttattgcggctcagacgatccagtgactttactaccagtgtatctccactgcgtaacagctgctcacgcagcgcctgatagccgggccgatccagcgtttttccgctggtcttatctacaatgatctcccgatcggcgactcccatcttgtgcagagcttctatctgacgatccaaattctgctcattgctagatactctggcatatccccaaattttactactcataacgcctcctgagtgtataataaggtcaattaatttttatacatgtataaaaattatcctaaagacctttttagacggtgattctataaaaaaagcggtgtgcaaaaaggtgtacctttttgcacaccgcaattttaaagaaactggctacttcttttatcacatgtggcggtcataccccttgctttagctatgggatcgccacaccttgttctcccgtaaagattgcaccgatgcaagcaacgtggtacaatcaggacggtgatgtatgtggaatattcgtacaaattccggctgtacccaaaccgaacacaagaaaatcagatcttacgcacactcggctgttgtcggttcgtgttcgaccactatctcgccatacgaaaagaagtctatgaaagagatgggagaacattcaactactatgactgcgccggtgatgtgatccaactcaaaaaaattctggagtggctgcgagaagtggatgcgaccgccctgcaatcctctttgcgagacttagatgcagccttccaaaacttctttcgccgtgtaaagcgcggcgaaaagcacggctatcctcggttcaagggcaggaaggatcaccgccagtcctacaaaagtaagtgtgtgggcacgaatatcaaggtgttggaaaaagcgtacagctttcgaagttcggccttgtgaagtgccgcaaagaacattctgaacgaaggtctgcgcctgctggtgtagatagaatatatggtagggcaggacatgcctgaacctatacgctcgggaaaaccatgtaagacccgcttgcgggcaacggtcagcgaaccgagaatcccccggatttatccgtagggagtgtcaagatagaaaactcatttttcagtttcagtgcttttgtactgagtgtcctcgtgatttttacagtatccaacgatccctttctcatgccgatcaaaattgaaaataccggattcagcagcaaaacgcacagtagtgcggtctaaaatattatctatttgtttattgacaagttcgctgagataatgtaatcgctgatctggtgctttgagttgcggatgttgtgcaaattcaaaaccatgtagatttttcaaatctgagcgaatactgtccgttaataatgcatgtgcagtaacattgagatctgtgccaaaacgtggagatgaacgactagcataccaagtcaaattacctatatggtcgtcatcaacactgggaaagagattttgattatgatcgaaaacgggagccattctcaaaggtttaaaggtatcgttatctataaggattccaaaattcccgaggtgacgatcgacattaaaaataagggcatcaagaacacacatgcgcctaaaactatctccagagtctaaagcattaaagtagtcgagcatgttggaaatgctttgtttccgcatgaaaatgcgacttgcgctaatatatcctgttttttcatcagtaaacagtttgcatgtgctgataagacgtccatgataccggtcaagatcatagtcaacataagatgggcacaaaatagaagatacctgtgcagccaaatattcagataaaggttcgatttcatatatagtgcttccggatttatagaggtatatctgttgtccggcctcaacacgtttccaacatttagcaaaagcgccttcggttccgaattctggagaagtagagggaaaatcaatgccgatagagactccgtcaaaggcagttcgactgattatttcactgaaaggatttttgtacaaagatacatcatcccatagcaagtcagaatctgcgcttttaacccataacgtgtcatttagggatagtgcgtgtgtagcctgaagaaatccttcgagatcatcgcagccatattgtcttagcagctcagcaatatgtgcgcggtgttttggcgctcgacggctctctatgaaagttgacagtcccataaagccaagcgggcgtgtatccgtaagccatttatcttcaatgaagataggttcttcgtactcatttcgctcgcaaataaaggataataatggcttgtctttattcataagataatattgcacagacataatctcacctcaagtccttttggacatcaatgaattcaatagagactacatggttttgaaagtctctttcatcaccttccatatatagtgtattgccattcttatctttcaaaatcgcactgtagatttccagatcggagtgaaaagcaaatttacagtcattttcggtgtattggtcaatatcttcctgcgtatcgtattcaagaaaatcagcttttagaagatcagaacctctacaattgccacctatgacatgggctatatgccctttgtactcaccatacataaacgtaacgcgaattgtgtgtaggttatttccaaaagacggactatagcagtgaagcatttacaagttcctttcgattagatctatattagctattatacgtattttgtcgaggaaaagcaatatgggtgcattacatactgatgtatccaaaaagaggagtgggcaaatttgcccactcctaattgttcctctatttgtgtttgaaaaaagcaaacattcctttctttttttgcggctcaacagtattggttgcaccaatgattttatcatacagatcattgctgtctgaggtgtaaacaaaaggatctggtgtgtactttgcaaagaaagtcatatcggctttatcctccattaaacctctaatttcctgaaagtcgttttcgtggacaaagctgaaaatatagtatgtactgttttgcagtataggtgagcggaaaacatcctgcatagcacctaattcgtgtgggctatcaccgcccacaataatccgaatgtccttttcgagaaactgaatgagattaaagctctttgacgaaaagcttccaaaatcgtatacaagatattcgtaccccataccccggatctcggcaatttgatccggcttggaatacagatctgtgccgttaagtgtgacgcggcccaaagatcgatctatatcctcggcactgtataagcctgcagctttctgcacgtactcactgtcattcagctggatatatgcagccttatggccgagaaactgaagatccgagttccttgaatcgcttgaatgatcccacaaatgccgcatgaggattttggctgtagatcagcatggtgtttcggatgctatatttgtagaactgatttttaaaccggaggtactctacgagtttctccggtttttcttcccatgtactaaccagctcattgacggatgcctcaaactcggccattcgctgcttacggtatcgttccctttcttcctgtgagaaattgatcctttgcactattcaatcacctccagtccaagcaactcatccgtgagctcctttggcatgttgtccagctcttccatgattttcttctgtagaggcaacggcagctcagacaactcctgcagatcctcaagtccgatagcagaaccaacttctgcaaactcttcaggaatctctgtgtaccacagagtaccatatccatcctcacagatagcaaggccgtctttatacatcattacggtagcgcttatctccattgtaattccccccatacatgaaatattaagcttatattaggcagattttaccaatcgtcaaggacgtagagttaattttaccctattttaagaagtgggaaaatcgcccacttcttttcgataacatgcacttcttgttttcccggtatctgatactctccaaaaggtacggctatgccgtgccctttggggggtatcagcaaattgctgataccttgaaagcacatattatgtgcgctgcttttggaatacatcgccatccaaatgacattatcctccatggacgcctcgttgggcaactgcgccggacatagtccacggtcgtagaggtcgccacgggggtggttcatgggtattaaacaggccaatgaccttacccagatcatgaggtagcaccagcaatttggtgtgccgctccttcattgaaatcctggcgaagctgttacatgatcctttgtattctttttggtgacggattcagtttttaagcggcattcatcgggtcctccgatggttgccggtatcttaagtgggcaaatttgcccacttttttgaaagactttttagaactgacttattctcacttaacggccgagattagaccattaaaaaagccatacctttttgaattcccctcctgataaaatgagtcttaacatttattaaaaggggttt

SEQ ID NO: 282 - DNA, 2483 bp, UBA1417 FBI02365
  source 1..2483: mol_type = genomic DNA
gcgggaagcattgagggtagaaaaggcgcgggctccccactcaaaaactacaaaacacaaggagcgtgagcgatgatggaatttccaattaccagcatgaccccggaggaacggctgtacgcatacagccagagcagcaagatcgagaggcagacgggctgtatcggctatctgcgcggggattttggcgctggaaaagagttttatacttcctggttcgaccatcaaaaggaatataagggcgaggagttcaaggcagagtttgatgaggtggtcaacaccctgcgggaaaaggatgggctgctttgcagccgggacagcatgagcaggttttgttatcaacatccagaggccgaatttgaggggaactactgcaccgaatatgggtttcgtgtgcaaacgccccagcacacctatatgctgcggtgcaatcccaactatggagattacgacttctacctctacgcctacgttgcccggtttctggaacatcacatggaaaaagccaaacagggcattcggtttatcacgcccggctacaaggaactgttccgtattcccgatggcgaccacatccgcattttcactggcggcggagaaacccgcgaccgtacctgccggtttatcgacgaaacccattttgaaaccagcggagggtattccagcgccctttatcatatctgcgaatttgcagagcgtttggaacagtctcacgggagcgtgattcccctgcgctcctctttgccagaacactgctatatttatcttcccacaacgagggaaatcggcattgtaaaaaaaggtgaaagtggctattatcgcagcgaccttacccctgtttatggggaggatggcaaacagtttgtggaagaattgaaccagaaaggcggcataacaaaagcgcaggaggccgccatgcttgccggctccatgttcggctggcagaccccagccgccgatcccaaaaactatgacgaacagggacagccaatcaaacgaaaaaccaaagaccggggtgaggcccgatgaaggaagcaaagcacatcatctggagcaactacggcctggactatgaggactggcgggaagatttagaggcggaatatccaagtctgtccgaaaatgaacggatgttcctgatgtatgagatcaacagcgagtatctgaatgatgaacggatgaacctcaatgtgaaactctcccagcccattttgatggttggagatttagaactgtgggatgggcagcgcacagggtataaagaaatcaaaagcggcaacatccgcgactgcctttatggggataccgattattccacctggtatgtagaccggctgggcgacctgcgctgtgaggccatccaccacgacggcacaaaccattatctctaccgggtatataaggatggggtgtcggaatcacagattgaccttctaaaagaaaaactatgccggggaaccgcgacccgcgctgatataacgagagtaacccgcaggctgggcgacgacatcgccaaagtctacgggttttctattcccagacagcggcaggccgcagccatggaaagatgaggtgatgaaaatggcgtctttaccgcccgtacaactggatacgcataaggactggtttaatttgctgatgacggttctccatcagcaggccgaacagaacccctatgaagaataccgggagatggcccaaaagctgatcggccagtttatgcgctatgggaggccctttactgacagcggccttgcaccctgcgtggagcttcggatgtacccaagggaggccgggaacactatctggcttctgctgctctccctgtgcaatcattacgacccggataaggattacagcgcagaactgaaagctgcgaaaaaagaataagtaaaggaggtgcgccggatggcgatacgatataaagcattgacggagctgtaccaggaagcccagcgcagcgtgacagctccaggggcatggcagaggtttcttgtctcagcctgccgcaactaccgcctgccttttgacgagcagcttctggttcacgcccagcgcccggacgccaccgccgtcctggagatcgagcgatggaataaacggtttgggcgctgggtgaaccggggtgcgaatggcattgctgtgtttgacagcaggcatacagacaggccccggctgaaatactactttgacatttccgacacccatgagggcaacttcccccagcccgtccctctttgggctgtgaggccggaatatgaaccggaaatcatcgaaacgctggagaacagctttggcgagctggagcataaggaggatttaggcacggccctgctctctgcggcaaaaaacgcggtggaggacaacattcaggactacctctccgagctgaaaaccattacggaaggcagttttctggaagaactggacgatctgaacctggaggttctataccgcaaggccctggaaaacagcattggata

SEQ ID NO: 283 - DNA, 1822 bp, UBA1417 FBI02365
  source 1..1822: mol_type = genomic DNA
aagaacgcggcattccgtcgatgccgcgttcttttgcaaatttttttggttattcccgaattcgcatttcccccaggcagtgatagccttgcttgtcccggaagtcgcttcgcatggcaaaaagcaccggcctttcttggtcaaagagcccgagatgcaatgtgtatgcgccggcgggcaaatcccgggtgcgcaggcggattcgttcctgcacggtctcgccgttcatccagcggcgattgtccgggctttcccggttcagccggaattcgtggccgtcctggtctctggcgatgatgcgcgtttcataaaggtgatatgcgggcgcgaatccccggttgctgatgtgcagggtgagcaccgcgtcggttccgcagcatagatcgggcaattcgtatccttccaggaaataccagtagcccaaacgattggcgcagaagtcgtgaaacgctttgttgttctcataccacgcatagatgtctccgtgaaaaccggcataggtggcatgcgtacgccgcatcgcctccagaaagcgaaacccaccgtccatgtcgtccgcccgctgcatggattgatgcgcggattccaaatctaccgggccactgcgccaaagccaatcgaatccggtgggattttgcagcatgtcgcaaccgtaatttacgcaatatccgtgtacatacagcgaatcatcccgcatgcccatgcccttgcctgcgcagtattccaacaaatatgcggcgtcctgaggatttgtcgcggccatgtggttgatcatgtcgtcgtttaccaggacgtatgtgtccgggaaatttttcagatgcagatcaatatggcgtttcagcacctccaggctgtatgaacggcaggacccggaggtcgtgtgaccttcgccccaggtgccgaaagtgcccacgtcaatgaaatccaagaggggatgcccgttgtaatgttcgccataggccgccatgaagcgttccagtttttccaaatagatcggatcgccataatcgggttccatgcaggtaaattgtgtgccggcagcgcctgcgtcaaatacgtatttcggcgttgcgtagggaatcatcggacggttggcctcgaaggtgcacatccgcatggaaaaccgatagccgcgctttccccacgtttccagaatatcgtccagcttttcccagtgatagacgccttcttcttcctcaatgtcgctccaatcgaagcgcagatacatgtgattcaggccaggataggccttcaggtcatcgcccggtttcaaggtgttgcgatactttggcgcgcgcatgccgttgtcaatgtagtggaaataccaccccttatggggattggtaagtacggttcggtcgtcctgcgcgtttcgcaggtcgtgatagaaccgggatggagtgggctgcgtgtaatatagcatacatttggctccttggttcagatttgttttctggacatgtcccaaatgggaaccggctggcatgtgggctgttccaacccttccagcagaggatacatgtgccgggcaaaatcttcaaattcccgcacaaccaaggggtagggacggttgcacacgtcgataagcccgatgttgtagcattctccgtcgaatcgtcccaggtatggctggtcgttgtattcgaaataatggatgcccaccaggtgctctgcctgcgtgctctgctccaggtaatatcgaatggcttgcgcgcgaagcgcctgcgtctccgcataatacagcgcgccaaaatccagaccgctgtcggcggcgccaatgtgccattcgcccacgatcatgggcattccggtggccttgccc

SEQ ID NO: 284 - DNA, 1815 bp, UBA1417 FBI02365
  source 1..1815: mol_type = genomic DNA
tttccattggtatcgcggtacacctcgaactcggccccggtgagcttgttgtccgggtagtccttatccactttcgtgagccgcaggttgccgtaaatgcgctcgttggcaagggagatttccactacctgcccatcttcctccacagtgacggggatgacctcatcagagagaatgaagcctgccgggctttccagctcttttaatacccaatccccaaaaggcacatccgcgaaagagaagctgccgtcctccgcagaggtggcggtggcaagggcgttttctgcggtaaactcggtttcatcgctctgaaagaggccgatcacagccctggaaaggcccgtgccattctcatcggttttgaggccccggatttcaccgcggatcagctcattggaaacagcctcgccattgttggcggcaatctccaccacggccagggaaggcccgccgtattcaaagctgaacgggaaggtttcaccattcagcaggtaatggctgtcggtggacagctccttcagatagaagctgccaaaaggcaggtcggtcttgcacatggcctggccgttctcatccacagaaacgatttccagaagcccgtctgccgggatgatggagccgtccgctgcggtgatgtcctcctgggcatagaggccaaaggtaacagcggtgatttcgccattcatgccaataccaaaggtttcatcctgctccagtaccttgtcaagcgtcacaagggctttctggcgctggttgtagaagctggcagaagtttcggtgatttcgacttcctggcctgcatacacaagctccacctcggtgatattctcgccggtgtccgccatgccgtgggggaactcgatttctttcacctggaatttgcccaggtagagaggctggctctgggccgtcccgtcctccccggtggtgatggtgtccaccacttcgcccgcagaatagcgcagggtgccgtccggcgtgtagacgtcctccaaagctgtgatctcaaacaccgcgcccggcaggccggtcacttcgtacaccggctgataaacgccctcgttttcctgcacggatgagaatacttcgccggttttgctgaccttgataacgcctttctgggccatgttggacttggtgacttcgatgactgtcacgccgccctcctcggtagaattgtcctcggtcacatcaaaatacacaggggtgctgtccagcacatagccatagggggcctgcacctccaccagcgaatagccggagccatactccagcttttccggggtgacaagatagccctcggcattggtgtaaaaggtatcaatcgtggtgggcgtcggataggtgaaggtcatttccaccttgctgccatccgggcggtaaatctggaagcctgcgcccgcataggggatggtgacgccggtttccgcgtccaccttgactacttttatatagctttcaaaggctgcattgttgatgagatagcggtaggtctgcccgtcctgggagatatacacctcaaaatcatccatcagctcccggccctcccagcctttggtctgatggacgatatacgttccatagggcagctttttcgactgcgcaaagccattctcatcacaaacaagaacatcgcgctcggagtcctttgccgcgtcatagctgcccgcagctttcagatagatttggaactctgcgccttcctccggggtttcaattcctgtttcgccatcgtccgtgtgtttgatgatggcaatatcccccttgatgatctgctctgtcacatcattggcggtatcattcagctcaatggtg

SEQ ID NO: 285 - DNA, 1502 bp, UBA1417 FBI02365
  source 1..1502: mol_type = genomic DNA
tatagctccggctccgcgcccacatggtggatggtggaatccacaaggtagccctcgctgggattgatttcacggatcgtccagtcggagtcgcagacataatagccggtggtgaactgaccattctcgtcggtcgtaaagctgtcgatgagggtatcgcccttatacagcccgtaggtcgctccggcaagggagccgtcgccctggggcgttcctgtttccacatcgctcttggtgacggtgacacggaactttttgaggatattgttcacggttttatccgtgacctcattccattcgatggtagctgtctgggcctccggcaccacatagcggatgggggtatccacctcctccagcacatagcccgtgccgatcagcacgttttcaaaccttgccactcctgtggaatccgtcaccgcgtactcatccaccggcaggccggagagggatgtgccggacaagtggaaggtcatgccctccgccaaaccgtcctcgctggttttggtaacttccaaactgccacgcttgagaacattgttaaaggtcacggtagccgtctggccgctgacgatggtgacgcgctgggtggcctggggttcatatttgtcaatggactgctcggttacggtgtaaacgccgggattgaggtcggtaatgtcgatttcacctgcggcattggtggttttggtggcgttatatccctcgccggtgatggtaaaggaaatcccctccaccttgccgtcctcggaagttttgagcagcttcatatttccggttttcacttccagattgaggtagcccaccatctggtcggaaaccgtcgtgccgtaggtggcaaagtcctgggtgccgcccccggtcacaccgtccgtccagaccaccacgccgctgcgctgggcgctgatcttttccgctttcacggttacagagcctttgagggcctggctggatgtgatggtgagctggctgccgtctacggagaaattcagccctgcggtgctgctggtaaaggtgtagtcccccagcacgccgttggcgtctgtgagggtgacagtgtatttttccccatcccatttcagctcataggcccccgcgtctgcggtgctgctgaaaaagctgggcagcatggtgtggcgttttaccgcgctttcaatcgcggaatactggctgaaaatctggctgcgcaggggatgttccgcgctgatatattccgttacattgtttttcccctgggcgttggcgtccacatggttgaactggctgtcgcgctcgcccacaatggtttcccagactaaaagctgggtggcgatatatccggccatctggttcgcgtgttcagggttgccgctcatccatgaggtgctggcgttgccctgccatccataggtcataatgcgtccgatatattccttgattgtgttgggcgggatggtggggttgaggcttgaggggtagttgtcccagaaatcctccccgcgccccgtatattggtcgccgga

SEQ ID NO: 286 - DNA, 1483 bp, UBA1417 FBI02365
  source 1..1483: mol_type = genomic DNA
tggaggaaaccagcaccggcatttatgagatggcccatatcctctacggcggcgtgttcgtaaaggaaaccaaagcgccggagggcttcctgctggatgaaaacgcctactatgtggagatcgccgaacacggcaaaatctacgaggtagagaacgaggccggaaaaggctttgtcaacgcggcccagaccggctccctgcggattgaaaagacatccagcgacggcaaggtggagggcttctccttccgcgtgacgggcgcgaacggttacgaccagaccttcaaaaccgataaaaacggtgaaatccacatcgagggcctgcgcgtaggcgattacaccgtgtccgaggtgtcggacggggccagcgccagctatgtgctgcctgcggataagacggtgacaatcctggcggataagaccactgtggcgcaaatgcacaatgaactgcgcgacacaccgaaaaccggcgatgacagcaagccgtggctttggatggccctcatgggcgtgtccgctgcgggcgctgccacgctgggtattctgggatatgtgaacaagagaaaaaagggtaacaaatccgctgaataaggcggtttgaatttgtgtcaggaggaaatcatcatggaattaaaagcaatcattgccatcgggcttgttcttttcatcatcggcgggctgatcttccttaaaatcagaagccggaagaaatagcagaagccacaggggcggccatacggggccgcccctcttacatacccaaaaaagaactggaaaggagcttgatggcagatgaaagaaccatttgaacagcggctgttccgcattttcgcccaggcgggctattccccggtgcagcttctcaccgtcaccccggaggagatggtggagatccccggcattaccgtccccaacatccgggcggtgctgtgcgtccagaacaaggtgctggccgaccgcaacaaaatccgcagcggcaggctggtggaggagcttctgaaagaggcgggagggatggaggtgcgcccatgagcgagctgcatatattggacgtcctggcggcccggcgcggctgctacatttccgacctcaatcttgcaccgttcctgcgccggatggcgctgtccgacctacgccggatggaggaaaatgcctatccgttctctcaatggcaggaggcggtgcgctacctcacaggggatgaacgggatttcgccagtgtaaaggaaatcaaggcgtttattttgagcgaaacggaggcaaagagatgaacgatgatttacaggaaaaacgcatggccggtgattatgagatcatccaagggctgcatataggcgaccgggagattgttctgggggaaaatccacgggatgaaaccggcatgaagtatatgtgcgccttttgccgtcaaaatgctttgtttgcagaatacagcgaagtgatggcaagtgatgatttcccagagattgcagagctgttcggcc

SEQ ID NO: 287 - DNA, 968 bp, UBA1417 FBI02365
  source 1..968: mol_type = genomic DNA
tgaagtgataaaataatggtagacacaaaagtgcctaccattatttttatgctattatagacatggaggtggcaatatggctggtaaatacacgatgcgaagcaaagaagaaaagttagctattgtaaagaggaatttagcaggagaaacttcaaggtcgctcgaaagagaaacaggatgcagtcatcggttaatacaagagtggaccagaaagtatctagcagaaggtgaagccgggctggaagttaagaagaaacccgggaatcctttatctcgttatgagcgccggaaggaactgacctacgaggagcagctgcaataccagatcgaactgctgaagcgagagctggttaagaaagaggcggaggtacttcgtttaaaaaaacggaacgaacgaaaagggggcgatgcccgaaaaagatgatccgagagatgtatgctgagattcaaaagcagacagacaaacattctgtcagcgaactttgcgaaatctacggtgtttctcgcagcggctactacaagtggttgaagcgagcaggacagttaaaccggtatgagaaaacacataaaatactggatagttatgtcctggacatccattcccaccacccaatgatgggataccgccagatcagggataagctgtaccttgaattcggttggatcgtcagtgatcctactgtttggaagtcaatgaagcgactgagaattcacggatacaccaggcgcaggaaagctgcggccacaggaaccaacttagaacacatccgctatgccaacgtactgaacagaaaattcaaagcagagaagccgatgcagaagattgtgacggatgttacttatatcaaacataacggcaagtggtattatcttgcaggctatttggatctgttcaacaacgagattctggaatgggaactcagcgatacttttgacaatttcctcgttatgaagccggcagagcgcct

SEQ ID NO: 288 - DNA, 892 bp, UBA1417 FBI02365
  source 1..892: mol_type = genomic DNA
gtgttttgggtcgggctgttgttcttttccatgggcgcatggatttccgtggtcatgaaacgcggagaacgggccgtgcaggttgcatatggaactgtgctgctgtcctatgggttgtcggtggcgtttgacatggacgaacggttggaatgcctgcgccctgtgacgttgtttcggtattttcgggccggagaattgttggaaggtcatctgcacgccggatatcttatctcgctgctgctgttttccgctttgttcttggcgttggcgtatctaggctttcgccggaaggatttgaacgccgcatgaagcggcgttctcaaaaaatgcgtcagaatacgggaatggcgacgcgctggcgaatttcgtgccggatttgcgccatctcctgcggactgggcggagcaaaaaccgtttgcgcgcattttccgatgcggatggacttgctcgcgcctgccttatggtacggcaacagagaaattccccgcatgttcgggtatttttgggccagcgcgacgattttgtccaggtatgcctcggtaagatttgcgcccggcacgatgggacagcgcagaaccacggctgcatccatccggagaattgcgtccaagttttgcaaaatcaacgtgtcttccacgcctgtgcaggcgctgtgcagagcaggatccgctttgcagtcaaagtaaaagcaatcgcaaaacggcgtcattttcaaaaaacattccgtttgagcatatccgctggtttcgagaaccacggatatgcccacttcctttgcagcttttgcaagcgccagcgcaaagggaaattgggccatcggttcgccgccggtcagggtaacgccgccgccgttggcataaaagagtttgtcccgcaggacggttttcatgac

SEQ ID NO: 289 - DNA, 608 bp, UBA1417 FBI02365
  source 1..608: mol_type = genomic DNA
gtcaatgccgcgctgctccagatattgaacctcctcctgcgcccgcgaaacaaaatctttctgcgcttcaaacaggctgctgaaatagtggccccagtagtaatccgtccggtctttgcatttccaggtgacaaactgctggggcgctgtcaaatgaacccccagcacaaactcgctgtcgcccacatggcaggaatccgttatgacatatcccgcattttctctgtaatccatcatcgctcacgctccttatcggttttctttttggtttgctcttgccggatggcagtaagcccatgcctggcccagccgggaaggttttccggttccatcgttcccatcacatccatgcgctcataccggccctcttttccggtatagaggtcaatgcaataacaggcagaccctcggctgtgtggataagttccaaagccgcccagacagagcttgagctgacgggtggcccttcggtattcccggcgcaacacctccggctttatcaccacgattttcccgcgcagattatcctcataggatatggggatacatccctccgctgtgatggggcggtcgtctatgccctgtatgcggggcttgttcagttctat

SEQ ID NO: 290 - DNA, 510 bp, UBA1417 FBI02365
  source 1..510: mol_type = genomic DNA
gcagccatccgaataagaaaaatgtgcccgcctgccatcgaagctggcgccgtcctgtgcgcccaatccggcatgggtgacgtatgaaaatgttcccggcatcataatgcgtccggccaacatgggagaatcctggaagatgtgcaaaatgttttccgcaagccatgccgccatggcgtcagcctcctggttgtcgttgccgtaatgaggcagtttgtggatgatatattggcgcaaagcttcatttcccgcaaaatcctgatctacggtctggataaattcggaaagcgtcaaacgcttttcttcgaataccagggtttttaaggcaatcagggaatctaccgccgtggaaaacccaaccagaattggttgcaggaagctgtaccgttcgccgccctcgaaaatactgcgcccccgggaaatgcaatcctccaccagacagcacacgcgcatgggttcgttcccgttgcgactggcttccaacatgcgcatgacataacggaaacagtc

SEQ ID NO: 291 - DNA, 476 bp, UBA1417 FBI02365
  source 1..476: mol_type = genomic DNA
tgtccctccacaaacagattgattttgcattgactcaaattcacctcgcttctccagctgttgacggaatgcatgcccttgatataaatcagccggacttccggcgcgtccggtaccgcatgaatacaatattgctccatcgtaaagtctcctcaaacgcgttcgttgttcataaatcaaatgatttctgcgcgaaaatccctatcaatctcatcttttctgcactatactctattatagacgggaagcacgacaccgtcaagcgctgaaaatccgcacacacacacacaaggaggtttgcgaaatgaaatatccgcccatcgcaatgacatggagaacacaaaaaattcgagaagaatatctcaagatgcccgtgccgcaggaagacaatccctatcttgacaaaaaatacaaacatttctgcacgggagaccgctggatcacgttgggctttttggaaggctggcttgcgcacg

SEQ ID NO: 292 - DNA, 397 bp, UBA1417 FBI02365
  source 1..397: mol_type = genomic DNA
gtgctatatggccggatttcaggacagcgcctcctttgcggcaattttcaaacgcatcacggggcttactccttcgcgctttcggcaaagcaatttcgaaagagacagaaattgatctgcagcaaagaagaacgcggcattccgtcgatgccgcgttcttcagacggtcgaaaaatgcagggagaatacgagagggcttggggcctttcgaattccaatcgtggcagacggcgtgtacggcaaccacgggcgctgttttttccacggaaaaatcgctgccttgcagattttgcggccggaatccgcaggatttccgcaaaatctggagaggatggccgtggcggggcgcttgcttccctgtccgccagcttgtcaaaaagacttttttgacaagcaa

SEQ ID NO: 293 - DNA, 362 bp, UBA1417 FBI02365
  source 1..362: mol_type = genomic DNA
tgaagtagtcaatagttagtagacataaaatttcttatgccaccagttctgttctatacgggactggtggttttccttttagtttgcggacgggtcgttcattgttgaaatagtagattgcctgctcaatggtagatctcagatcatcacattcccagtaacggaagtgcttgcgcagcgtgtccttgaatcgcccccaaaagctttccataactgcgttatcgcgagggtttccggcccttgacatactttgaattacattgtattctttaagcaggttacaataacctgcggatgagtactggacaccttggtcgctgtgcaaaaggatttggtgttcggtgctcatttttcttttcaga

SEQ ID NO: 294 - DNA, 344 bp, UBA1417 FBI02365
  source 1..344: mol_type = genomic DNA
gcctgccagtattccgggtggaaggtttgcaggctgtcgttaatcacagcctcgtattccccaggggcaaaatactcgttgacaggcgcttgatacagccctctgtccatcagctcccgcaatgccaccggcgcggcgcagtcctcctcaaagcaaaggtagccgcgctccataaagccgcaggctctggcttccttgcaaagcgccttgtctgcaagctcccggctgaccataaccccgccatggcctgcggtgctgacggaataagcgccggggcaaagggtgtggcaggtctggatttctccccagggggaatcggcgggttccagctccatcttgttggg

SEQ ID NO: 295 - DNA, 340 bp, UBA1417 FBI02365
  source 1..340: mol_type = genomic DNA
tcttcccggctgcagccgtatcgcatcagggattcaacgattgccgaatcgttgtagaatgcgggatgggtaattcctttggaaagaatttccacggaataatgcaaaatatcgtcgctggtctggtcgtttaccgccagcgcgccgttggggtcgggcatgcggatgtgctccagcgccgttaaaaacatatatgtcaattcgttttccaccagatttccctgggcatcctgaccgcctacgatgaaaccgcaggctgcccggctgaatactcgcgtggaaacgtgcagacaaaaattgtcgatcagttcctgcgcctcgtcccttgtaaggacgccgg

SEQ ID NO: 296 - DNA, 276 bp, UBA1417 FBI02365
  source 1..276: mol_type = genomic DNA
gaaatgaccgttgatgtaatccagcgcggccatcagcggcgtcggataaaaggaggcactttgcagcggcgcggcgtattcacgacaggcatggatggcacacaggatttccagcagcatggatagcgccatcaaattgccatgggcaggattcttccgcagacagttcagcagacgatagaagctttcgttcagcgatttcaaccgttccgcatccggtcgaagaagcacgatgggctgctgttccgggacacgttcggcaaacaggcgaaccag

SEQ ID NO: 297 - DNA, 276 bp, UBA1417 FBI02365
  source 1..276: mol_type = genomic DNA
ttggttcgcctgtttgccgaacgtgtcccggaacagcagcccatcgtgcttcttcggccggatgcggaacggttgaaatcgctgaacgaaagcttctatcgtctgctgaactgtctgcgggaaaatcctgcccatggcaatttgatggcgctatccatgctgctggaaatcctgtgtgccatccatgcctgtcgtgaatacgccgcgccgctgcaaagcgcctccttttatccgacgccgctgatggccgcgctggattacatcaacggtcatttt

SEQ ID NO: 298 - DNA, 248 bp, UBA1417 FBI02365
  source 1..248: mol_type = genomic DNA
tgcgaaatgttccgcatgtcctccgttacgcttttggaacgcggaccgcgcattgatcacttgtcgctggatttggaaaagcttctgcgcatcggcatttccgggatcgtggcggaaattcatgcgcgcatggccgaattaaacctgcaagacagaaatgtatatccggaatttgaagtcatgaaacaatatgatttctacgaatgctgtctgttggaactggaggcgttgaaggatctgcaaaagcg

SEQ ID NO: 299 - DNA, 232 bp, UBA1417 FBI02365
  source 1..232: mol_type = genomic DNA
gcgttgcaggaggaaattcttgaaaggagggaatattgaacaactccgtttgtgaacgcggcaatgcgcgggagtgctttcttcgcacattggcaagacatttcggaattgttccggcacgatggatgaattgatttgtggaaacgtgttcaacattcagcgttattccctggacgatgggaaaggcattcgaacctgtgtgtttttgaagggatgtcccttgcgatgccgt

SEQ ID NO: 300 - DNA, 232 bp, UBA1417 FBI02365
  source 1..232: mol_type = genomic DNA
ccggcatcgcaagggacatcccttcaaaaacacacaggttcgaatgcctttcccatcgtccagggaataacgctgaatgttgaatacgtttccacaaatcaattcctccatcgtgctggaacaattccgaaatgtcttgccgatgtgcgaagaaacgctcccgcgcatcgccgcgttcacaaacggagttgttctaatattccctcctttcaagaatttcctcctgcaacgt

SEQ ID NO: 301 - DNA, 213 bp, UBA1417 FBI02365
  source 1..213: mol_type = genomic DNA
aacgtgaaattcgcgcccaagcacctgaccccggaacacgcggattcctttatcgccatgctgcgggcatttctccaacggggaggcatcgaaatgcaggtgaatgtcgtggacagagaaacgctgctggacgcgcgcaagcacccggaaaatcatcgggatttgatcgttcgcatcggcggatacagcgattattacgtgcgcctgagcgac

SEQ ID NO: 302 - DNA, 190 bp, UBA1417 FBI02365
  source 1..190: mol_type = genomic DNA
cgcggtaaactacattcacaccacctgcgcggaaatctccgtggttggaaagacgaaatctcacaccacgccgttcatggtggcgctgcccaagacgttaaaagaaacggttcgcgcctgcggcaaggaaaccaccttcgcgcagctccaaagcgcctatatagagcagatttccatgcaactgtcgaag

SEQ ID NO: 303 - DNA, 190 bp, UBA1417 FBI02365
  source 1..190: mol_type = genomic DNA
tttcgacagttgcttggaaatctgctctatataggcgctttggagctgcgcgaaggtggtttccttgccgcaggcgcgaaccgtttcttttaacgtcttgggcagcgccaccacgaacggcccggtgtgagatttcgtctttccaaccacggagatttctgcgcaggtggtgtgaatgtagtttaccgca

SEQ ID NO: 304 - DNA, 170 bp, UBA1417 FBI02365
  source 1..170: mol_type = genomic DNA
caggagagcattaccaatgcaacgatcagcggggtggcggcggttagcccatcctatctgaaccggctgtttcgaaaatacctgcactgtacgccgcatgcgtatttgctttcccgtcgcatggcatatgcgcgcaattgccttgtccggggtgcttccgttacggaaac

SEQ ID NO: 305 - DNA, 168 bp, UBA1417 FBI02365
  source 1..168: mol_type = genomic DNA
cgcatctccgcccgtcagacaggccaacgccgcaggttcaaacaacaattcaaagtattcaatcatctgttcatagggaatatcgccgtaatgaatgtcatgcggacggtacagcaggatatctcccgcattcgccacatgggattttccattgatgatgatgtagct

SEQ ID NO: 306 - DNA, 152 bp, UBA1417 FBI02365
  source 1..152: mol_type = genomic DNA
cagttgatcgtaacgcttctgttcttccggcgtgtattccggcagatacagatgccctgtcagcagttcgtgttccgtaatgatgggttgtgccgcgtataattccgccgcttcggcataagaacggcgcctgcgggtggtgggagcgtctt

SEQ ID NO: 307 - DNA, 152 bp, UBA1417 FBI02365
  source 1..152: mol_type = genomic DNA
tagacgctcccaccacccgcaggcgccgttcttatgccgaagcggcggaattatacgcggcgcaacccatcattacggaacacgaactgctgacagggcatctgtatctgccggaatacacgccggaagagcagaagcgttacgatcaacta

SEQ ID NO: 308 - DNA, 134 bp, UBA1417 FBI02365
  source 1..134: mol_type = genomic DNA
cttcgctgcggaatgcagatcaatttctgtctctttcgaaattgctttgccgaaagcgcgaaggggtaagccccgtgatgcgtttgaaaattgccgcaaaggaggcactgtcctgaaatccggccatatagcat

SEQ ID NO: 309 - DNA, 129 bp, UBA1417 FBI02365
  source 1..129: mol_type = genomic DNA
tggtgccataatgcggaatcccagtgctttgcacaagaactggcctatcacgacggcgattgtattggttgcggggcgtgcgtccgcgcatgccccaggaaatgtcacgaaatccacggcggcgttcat

SEQ ID NO: 310 - DNA, 121 bp, UBA1417 FBI02365
  source 1..121: mol_type = genomic DNA
ctgaactgtcgcaaatggccgaaatcctggaatgggtgccggaacatcccgcccgcaatttccgcgaggcgctgcagagcgtgcagtttttcctgggcacactgtttgggctgtatcctct
